United States Patent Application Publication US 2006/0040262 A1 - sequence listing, part 2

SEQ ID NO: 86 - DNA, 128963 bp, Homo sapiens
  misc_feature (1)...(128963): n = A,T,C or G
nnnnnnnnnnnnnnnnnnnnnnnnnnnnnnnnnnnnnnnnnnnnnnnnnnnnnnnnnnnnnnnnnnnnnnnnnnnnnnnnnnnnnnnnnnnnnnnnnnnnnnnnnnnnnnnnnnnnnnnnnnnnnnnnnnnnnnnnnnnnnnnnnnnnnnnnnnnnnnnnnnnnnnnnnnnnnnnnnnnnnnnnnnnnnnnnnnnnnnnnnnnnnnnnnnnnnnnnnnnnnnnnnnnnnnnnnnnnnnnnnnnnnnnnnnnnnnnnnnnnnnnnnnnnnnnnnnnnnnnnnnnnnnnnnnnnnnnnnnnnnnnnnnnnnnnnnnnnnnnnnnnnnnnnnnnnnnnnnnnnnnnnnnnnnnnnnnnnnnnnnnnnnnnnnnnnnnnnnnnnnnnnnnnnnnnnnnnnnnnnnnnnnnnnnnnnnnnnnnnnnnnnnnnnnnnnnnnnnnnnnnnnnnnnnnnnnnnnnnnnnnnnnnnnnnnnnnnnnnnnnnnnnnnnnnnnnnnnnnnnnnnnnnnnnnnnnnnnnnnnnnnnnnnnnnnnnnnnnnnnnnnnnnnnnnnnnnnnnnnnnnnnnnnnnnnnnnnnnnnnnnnnnnnnnnnnnnnnnnnnnnnnnnnnnnnnnnnnnnnnnnnnnnnnnnnnnnnnnnnnnnnnnnnnnnnnnnnnnnnnnnnnnnnnnnnnnnnnnnnnnnnnnnnnnnnnnnnnnnnnnnnnnnnnnnnnnnnnnnnnnnnnnnnnnnnnnnnnnnnnnnnnnnnnnnnnnnnnnnnnnnnnnnnnnnnnnnnnnnnnnnnnnnnnnnnnnnnnnnnnnnnnnnnnnnnnnnnnnnnnnnnnnnnnnnnnnnnnnnnnnnnnnnnnnnnnnnnnnnnnnnnnnnnnnnnnnnnnnnnnnnnnnnnnnnnnnnnnnnnnnnnnnnnnnnnnnnnnnnnnnnnnnnnnnnnnnnnnnnnnnnnnnnnnnnnnnnnnnnnnnnnnnnnnnnnnnnnnnnnnnnnnnnnnnnnnnnnnnnnnnnnnnnnnnnnnnnnnnnnnnnnnnnnnnnnnnnnnnnnnnnnnnnnnnnnnnnnnnnnnnnnnnnnnnnnnnnnnnnnnnnnnnnnnnnnnnnnnnnnnnnnnnnnnnnnnnnnnnnnnnnnnnnnnnnnnnnnnnnnnnnnnnnnnnnnnnnnnnnnnnnnnnnnnnnnnnnnnnnnnnnnnnnnnnnnnnnnnnnnnnnnnnnnnnnnnnnnnnnnnnnnnnnnnnnnnnnnnnnnnnnnnnnnnnnnnnnnnnnnnnnnnnnnnnnnnnnnnnnnnnnnnnnnnnnnnnnnnnnnnnnnnnnnnnnnnnnnnnnnnnnnnnnnnnnnnnnnnnnnnnnnnnnnnnnnnnnnnnnnnnnnnnnnnnnnnnnnnnnnnnnnnnnnnnnnnnnnnnnnnnnnnnnnnnnnnnnnnnnnnnnnnnnnnnnnnnnnnnnnnnnnnnnnnnnnnnnnnnnacagaccagccattcagaagcaattttcttcaggctgaaattatgtgctgaccttagcagatcacttcccataataacccttcccccacccaatgctaaatacaatctgtctcctactcactgtaataacgtgcaaatgactgtaattttacagacaagaaacagccgaaagtgaaacgtgtctaaacagaggtcgatttgaaaaatcagggctattacctaaatctgtaaaatacatattgtaataaaaccagcaacagaaatctccaataagtagttcttttttttttttttttttttaatgtagcttgtgttttgatcttctttatgcagccagtctctgctggcataaaagaaaaatccttttccagaaatggtttcattacacgagatgtaaattgccttactttgctaactgatcctcagaccttgcttgagcacccactcagatatagctgcacacaccacaccacaaaagcccgagccaagcggaggtacaatttcagatacttaacactgacctacattgcacttctcttaatgagagcagtatacaaatgttttcctttaaagatcacattgttttgccatattttgctaggttctctagagctgcaaggcataaaaaagacaatttgctgctttttattttgattattttaagatggaggattagagactatatgaggaattacataaacatagagggtttataagtatataaagttcttcaactttatattgctttactaattaaatgcattgtagtcttaaataaattcacgtaatatttgctctatatcatcgcaacttgtttaaggtaaactgtattgtaaagacatgtcaagacagttattactttccctcccttgggtggagggtctttttgttatactctaaggaatttaaactgaaggtgaattaatagggcatagaagtatcttgaaaagttaacatagcagagtaatacgatgtgtgtaaatagtcgtatttacaaaatgtatattggaaatgtcccacagtctttcatggcagggagaacattgttgatgtttttcttctctgagacccttcatgctccccaaaaggacctgaaatgttatggtgtgcaggggcccttctttccacggtagacaaggctcttagtgctttgtcttgttccagtgatatttcaggataatgcaaaacgtcaaatgtttgaccaagaacaacactgctcgtctccttttggcaacagttatccagaaatggatatttttgtttttttaaaaagacagggtccggctctgttgcccaggctagagtgcagtggcgtgattatggctcactgcagcctcgacctcctgggctcaggtgatccttttgcctcagcctcctgagtagctggcattatagaccaccttgcctgactagtttttttgattttatatagagacggggtcaccctatgttgcccaggctggtcttgcacttctgggctcaaggcatcttctcaccccagcctctaaaagtgttgagattacatgcatgagtcaccacatccagcctgggaaatggatattgtttaaagtactacccagaaacttaaattggatttagcatgcaggtgtgaaaaagtagagacagtgttttttctagaggacctttagcaagtcaggatgttacctgtagggaaaaaaagcaaagaccttcttgtgtttgtgtgggtgtttaataagtcatcaactgtattccctagaaaccagggcaggacacctgcccactgccttgaggccatcctgttgataagcaaacccagagagataagaatctttctccataatcctctgggatagccagtaagtttctcattatgtctaaattaagttctttttcctataaattaaccccatttccatgttggtttcattttttataactttgttttccactttttcccttgatcctgagtagatctcaagtgtcaatgttggcataaatatagaaaaggtaggcctaggaatagactcccttacaaatacacaaaaactggagaaatagatatatatttagacatgttctcattctgttgcccagactggagtatagcagtatgatcatagcttactgcagcctccaactcctggccgttaatgatcctcccacctcagcctccagagtagctaggacataggcatgtgccaccacgcctggctaactttttaaaaattttttgtagccgagcacggtggctcacacctgtaatcccagcactttgggtggctgaggcgggaggatcacgaggtcaggaatttgagatcagcctgaccaacatggtgaaaccccgtctctactaaaatacaaaaattagccaagcgtggtggcgcacacctgtaatctcatgtactcaggaggctgaggcagaagaatcccttgaactcggcaggtggaggttgtagtgagctgagatggcgccacagcattccagcctgggcgacagagtgagactgactcaaaaagaaaaaaaaaaagaaaaaaaaattttatagagacagggtctcgctatgctgagcaggctggtcttgaattcctggtttcaagcgatcctccagcctcagcttcccaaagtgctgggattacaagcatgagtcactgggcctagcccaagaaataatctttgatctttaataatataccctaaatcagaggaaataggcaccaaagaaagatcaccatgttttcctgtgttactgctagaagcccctggcctcctcagcattgagatcgtctgtctttaaaaaaggaggaaagggaccttttgatgaccttaacaatgatgtagtacaagcaggggcagagctgatcttgagatccaaggagcgggtagtggaggttgttggagggggatgatactgttttgtttgtttgtttgtttgtttgtttttgagatggagttttgctcttgttgcccaggctgcagttcaatggcgcgatctcggcttgctgcaacctctgcctcctaggttcaagcaattctcctgcctcagcctcccgagtagctgggattacaggcatgcaccaccacgcctggctaattttgtatttttagtagagatggcggtttctccatgttggtcaggcgagtctcaaactcccgacctcaggtgatccgcccacgtcggcctccaaagagctggatgatactttttaaatgccccttttacactatcctcatgctccttccacccctctgttccaaatactcatttcctgacatctcctcctttctaccacatctctgagtagacactaaggtgtaaaattacatagtgcttatattatacagtagtgtattgatattatgaagtatatgcatgtggatattagaatggtgacaaataggttcctagttaccttgatgagagattaagataacattttcatctctataaatacagaaaacttcccaattttgtgagaggagtagctctgattttcaaaactggtagttaattgtcttagtttcagtcatcaattagctgatggtcctctgatgccttttgattggcccctttgtcaaacaaaacaaaacaaaacaaacacaagaaaagccagtctgacaacactggtttattcaaaagtctcctggaagaacctgggaggaaggaggtgggggtggggtgtaaatggagtgtggagatgttggaatggaaggaaatactttaatttatcaaaatggtttgggttaaatatgtggtagagtcgggcctaagccttcatcttgggccagtagggtttctcagaaaggtttaaggtttgggtttaagtgttgaagctcgggttagattagattatttgattattacaaaccctaaactttggttttagttagacttcatctgtgctgcagacgctgtaatttgttttgtattggaggaactccaatcttctccagcttcactaggtctcatttttaaatgtcccattcttttaagaactacctatatattatttccaaactaatataacatatggggtaggcatgggcttccaaaggctgagatgtagatgacaccccagggacacaggaagtgcccaagagtgatctgatcctttgagaaatcactcttttagaagaagaaaagttaaaaaacagtatggtgctgtattcttatcaatggggcatacacaaatgtaaaatctgtatattcaaaaatataaaacaaatctcaaagctaaaatggaggctaggtagatatcagatccctaatttgcccattttatttgttaaagtacagctttgatttgaatacaaattgacttagggagagctaaggactagtacagattgcattcctctggtttatatgtcccaataaagggtggaaactgctgtttattactatttgcagcctcaaatctagttcatttatggtagtgaaacagctaattggcaatttttttatggactaaatatattgaaagctcaaacatgagtcaatagccattatttaaaatatgtgacataaatatttttattgatccacgaagtcatcactgaatatttacatcagaagctgtcttctgctagcactcattcactttacatgtccatatgactcagttaagacacaaccttaaattacaattgtcacgtggaaattacaatcccagtagtactggatctttaaaacttgggatcatgatgctttcagtttacagtaacctttgactttcaaatgtccatattgtagcttctaaaaacaatgaaggtaacaataaaaaattaaaaattaaatgtactctaaaggcttaatatatgtaaatacattagcttaaatatgttagctgttatagtaaaatgttaaacttgttatttcatattaacctctcttatcctatgagctgagtctcattaacttggttgctggcatttgtcctacaataaattctaaaatatttctgtgtttgtggattgtagatgtagcattcagaggattcatgatgcccccttccccaccagtggggttaaagatatgggggaagaggaattctgacccttccacagtttaaatacgtgtactgggactgtttaacagttaatcttcctagtacatttaactttcataagtcgattttttaaaagatgaggctggcccgaggtgttactatgtttagctggggccttattttaatattaagtttttcttttttggagtcacataacaccaggtggaaaagatttgttactaattccagggaagaaccattcacatagtgttggttaaatggtcgcctgcgttcacacttcagtgcctgtagaccagagccctggaaacaaaagggttacttgtttccccaccatcgcctttacccgcagatcgatttttcttatttaatcagcgagtaaaaagagagacacagggaagaaaaaaaaaaaaaactgcaggaagggcaaagtggtggggggagggttgaaagccagaagctgcaatacagaaaatcagtcttgggagttgggctgcgaagtccttggaacaaggaagggaagccggcaaaatgctcgcagtcagttccacacagccagcctcccttttctcttcgctacgcgctagcggctcgtttggcttctctctgccaccgagcgatcacatacattatttcccccaagataacacaatcaaacttgtatttaccgacatcctctcctcgcagcccgtttgagatttgttttaataaataagtgttttatgtgaatgatgtagtaattgaaaggggcgcaccatttttttgccttcttactgcgggaggttcctcaaccccaatctggttggaaaataaaacgctttgtctccacaaccacaccccccacagcacccccacccgctctcagtgtgtgttttatacgtgtgtatatctcaaccccctacagtagccaagagaaagcagctagccaatgagagagcccagtttcataaaagctgctctctgattggcccgatgcgaaagggcactgggaacaaagaaaagtccctttcaggtatagaggctgagagcttcttttgctccactccccctgtgtgtgtgttgtgtttcagtcctgatttagtgttgcagaacaagcttgttgtgtgtgtgcaccagggggatttttgttttgctttttttaaattttaatttttgcttttataaaaaatacacaggacggtctgtgacatttgatggtccatcttctttaataataaatttgttgaagagattataatttccaaaataaagcggctgcaaccaaacacattcaatgcagttagaaggaaaaggtcaactcgatccaatacagaccgtaagtacggttgcgtggtgtgtctctatatagcacttagcggggacttcatgcaggggaatgtgcgagttttatgcatagaaatgaggaactagttacagggtttggcttttgcatttagaacaacaacccaagaagggtgaattttattcagtggagggtgaagcatttgtaacttcacacaaattaagcttgactgggcactcggggtaacttagaggaaattagcttttgggctctaacccaaaggagaataaaagtgacacagttgcatatcctggtctgcagtgtcaattctctagctcaccttactccctccctcttctgtcctagctgggcagacccccctcccaaagcgatccaggaaaatgggggcaagggcagaacaagccgatttctgtctcctgtcagatcccagtgcccgataatttaatattaaacaagggaatagtcactcattacatgtaatggttataattaccattcgccatctccttaaaaaagcaagcaacaaaaataccattaagagaaaaaataaaagccccacccaacccaaacaaacccacaaatagtaacaatggtgtatttattacaggaccaggctggggagcaagcaaaaggtttttctttgtttaatacatgaagtgggggtccctaaaatccaagtagctcggnnnnnnnnnnnnnnnnnnnnnnnnnnnnnnnnnnnnnnnnnnnnnnnnnnnnnnnnnnnnnnnnnnnnnnnnnnnnnnnnnnnnnnnnnnnnnnnnnnnnnnnnnnnnnnnnnnnnnnnnnnnnnnnnnnnnnnnnnnnnnnnnnnnnnnnnnnnnnnnnnnnnnnnnnnnnnnnnnnnnnnnnnnnnnnnnnnnnnnnnnnnnnnnnnnnnnnnnnnnnnnnnnnnnnnnnnnnnnnnnnnnnnnnnnnnnnnnnnnnnnnnnnnnnnnnnnnnnnnnnnnnnnnnnnnnnnnnnnnnnnnnnnnnnnnnnnnnnnnnnnnnnnnnnnnnnnnnnnnnnnnnnnnnnnnnnnnnnnnnnnnnnnnnnnnnnnnnnnnnnnnnnnnnnnnnnnnnnnnnnnnnnnnnnnnnnnnnnnnnnnnnnnnnnnnnnnnnnnnnnnnnnnnnnnnnnnnnnnnnnnnnnnnnnnnnnnnnnnnnnnnnnnnnnnnnnnnnnnnnnnnnnnnnnnnnnnnnnnnnnnnnnnnnnnnnnnnnnnnnnnnnnnnnnnnnnnnnnnnnnnnnnnnnnnnnnnnnnnnnnnnnnnnnnnnnnnnnnnnnnnnnnnnnnnnnnnnnnnnnnnnnnnnnnnnnnnnnnnnnnnnnnnnnnnnnagactttcagcttttttttttttaaagaccagatcagtattttcttgatacgcttgtcaccatttttgttctcacgacaaccaattgagcccttgatcctcacgtgatgtgaaaggcttgcactgtaacaaaatcgctccttttagatggttggttgttactaactcgcccatccccctctcccagccccgacatttccagcaaagcgactctccacttccaatccatcaacaattcattactgcttttagcttccaaacgccagctaattaaaaatactaagccaagctccggggccatctgactaaacacaggaggggctgggcgaagggagaggagagaaaaaataaataaaagggagacacaccgtttgctgcgagtataagagggaaaaactcccgaaaagggtcgccttaaaaaaaaaaaaaaagaaaacaaaaaccttattttgactctaattatcgaattaccacatgactggctgacctgagcgacagaggattccactcccctcgggagctatactaggaactcagttcctttttcttaaaacaacataagacaggaaaacatcacatcctttaggtttcgaagactgagcccattttaaacgccgttattttccccaccccaccgccccaagccccccgccccccgccccgagcgaatgctgttataactggtttatcagctcactgaatcatctgctgtctcctcctccacacctttctttttctcttcttgcccagtttctcatcccaccctttcttctcctcctcctccctctactccccccctccttttctcttaagttagttcaagaaatcaaatctgtcaggacgggcggaaaaatgccacttcccgactaacaggcggaatccagcccagattttcagtcctttcttcttattctttcttccctttcactaatttatcccgatgttagcacattctgtctcgttactagcggacgcctgtaggtttgctacatgggatcattactgatcacggtgactctgaagtctggaactgaaggcggaatgagaagttgggaaaacttttttctctaaactctctgttttttaaaaaactattattctcgatgcttgttaagaggaaaaaaaaacctttggtgcttctgttgtgaatgtgaaacattattttccagctgtacagtgacacattttttttaaggagaaaaggactgattcgtttgccaaaaggggggtggggaggtggaataatgttatcgagtgattattctggctgagatgtgttatttggtttcttccttcttgatcatttggtgtttaagtaaaatgaggcacaggcttgtttgccgagtggagtgggaaaggcattttgatttgctggcctaattaaaaaatgataaaggattaaaaggtaagcaatgtctgtgtgtgtgtatgtgtgtgtgtatgtatatttatttatttttttcttgacaatcaactgttaaaaaggggctgatccctttaaaaaccgttttaactgctctttgtcaaacacactcatttgcggtcattgaggccaccttggcgcagatcacttaaagtgtatgtcttaatcagttttctgtacagtcagtagcaccgtatttaagagagtgagcaattctctgacctaggaatatggtagaattgtttaaatgtatttttttctcaaaaggcaggtatttaactttttatataacactgtcttttctagagagaaatgctcttaaaagacatgcatatttcaaaaaagaaattgtagaagctgtttgggaaaagaggataggagggaggtatgtgtgtgtgttgggggcagttattggttgttttttctgttccttactaggaacaaaaaacagattgcccagacaatttgtaaaaagaagtactgaaacctaaattagaaataaggaaaatttagcaacattctattctgaaaactagcctcagaacttccagggtctggtcttctaaattgcaagatctaggacatgtttagggatgtttaaagctgtgttcttccttcttgtctgagtgttcaggctgtgtttctggggttgagatatcacatgtgccagactgaaatcctaaactttaaaaaagaacacaaaaacctttctggacttgaatcagatccttaagataatttaatgcttttaaaaaggtgattatccttgtgttgttgataaagggattttctttttagctaccgtaagatgcttactgtcataggtttatttttcgggtttggttattttcctttaaacctgatattggactgtgaggacaatacatgagccaccttactctccatccttccctgtcccctttactgattccccaatactaatcgttttttattctggtaacacccagacaagaaatattcgacttttcccccccccttcacaggaaaaggtggacctggactgagggtgtaaaatccctggacacattcgtggggcaggaaaaagaagaggaagattagaagattttttttttctttgagagaaagcccagcggagataaacgaatgtcccctcatctccaaagaaaagttcatcggatttttattctagagagctcatcttcaggatgtcagtgaacatttctactgcaggaaaaggtgtggatccaaatacagttgatacttatgacagtggcgatgattgggaaatcggggttggaaatttaataattgatttggacgctgatttggagaaggacagacagaaatttgagatgaataattccaccaccaccactagtagcagcaactccaaggattgtggaggtccggcctccagtggggctggtgctaccgcagccttagctgatggcctaaaatttgcttctgttcaggcctctgctccccaggggaattcacacaaagagaccagcaaatcaaaagtgaaaaggagtaaaacttctaaggatgctaataaatctctgccttctgctgccttgtatgggattcccgagatcagcagcactggcaagaggcaggaagtccaagggcgccctggagaggcaactggcatgaattcagcgctgggtcaaagtgtgagcagcggcggcagcggcaacccaaacagcaatagtaccagcaccagcacctctgccgccaccgcgggggcaggctcctgtgggaaaagcaaagaggagaagccaggtaaaagccagagcagccgaggcgccaagcgggataaggatgcggggaaatccaggaaggacaagcacgacctgcttcagggccaccagaatggcagtggcagccaggccccttccggggggcacctctatggctttggggccaagagcaatggaggtggcgcgagccccttccactgcgggggcactgggagtggcagcgtcgccgctgcaggggaagttagcaaaagtgccccggattcagggctcatgggaaactctatgttggtaaagaaggaagaggaggaggaggagagccacaggcgaatcaagaaactgaaaactgagaaggtaggataaagtcgccttcctagatgtcctactctcctctgtgtgcatttgtgtgggtgtgtgggggtgtgcctctgtgtgccttacactttatgctttctggttctttgtgagatttctatgatatgcatcctttatattaaaatttgatatgggggagcctacttgggtgcagtgtttggctcttgcttctgctgtccttgctgctgctgctgctgctgctgctgcttgtgatgctagtgtttgggttcccaggtgggagggcctgagtgttctaagtaccttttgccctgtagatcggttcctcactagtcagcaggttgccgtgtgcttttaatagaaaacctgctcatgcaccctcttgactcttgtcctgctttcttccttaaggggaacagttttctattttaatttattcatcctagtattgcgggtaatgtgtccttaggtgcaaggttcaagttccctccctggagaggaatgtcgaggattcgaatttacattctacagacctcatcccttttattttttcttactgtctccaaaatagtactgtgaaaggatatccttgaatgagttcttgttattggtcctgaatgaaaccccaagcttgatgtgttgggtcattggtttcataactgcagaaaaactcgatggttttggtggctgttagcactctacccctgttccctcacccagttcttagctagagatttaagagtgttatcacttggatacctgactggggagctggacggctgctaagaagaataaaacagacttgctggactgatactcgtgaaatgtgaaaatgtagccaaaggggatgtagacggttgagtgaattggaatatagaattatgtgctgcatttaaacggtgtggatggttgatttagaccatttggacccttctccccttctttgtacaagtctatagttagacactgccttggaagaactgcctgccccgacacccacaccatgttttgctgcttagtcatagaccacattgactaatgtttgggaacagaaggtgttctgtccactaggcaggttgggaaggagttaggggtgtgtgtgtgatatttctatgaaattaatcttcatattaattctacaggttgtgccttgcagaagcaagctttctgtcatgtgggttgtggcatggttgttggggaacatccttattaaataattttgatttttttttgctatagttggcgattgggattgtaagtggtgataatatgtctttggagaattatttctgtgtaaaatggttcactgctacttaaacttttatattcttgtttttgtgttcaggatttaagttggagtataggagtaaagttttgatttttaaaagttgatagaggcacattaaggtgtagataatgccaaatttgcaaaatgcctccaaacgcttataaattcatatcctcttggtcaggtacattaatgaatataaatgaatttttgaaaattccgggttttgagtcttatatttaaatgtgtagtttcacattatttccgctaaaaggtgttctgaaatcttcttattacttagtacagtagggcatttacttttgttgccaatagtcttcaaattgcagttctaatctgctttaactatctagatgaattgccctaatccagtgctcacaatggctgtggttaaggagtcagagccatttgattggattcactggctgcttggaatgtgggaggtactgcccttttgcattccccttagccttttaatcttccagccaaatgttcacattcaacaattttgtttagctggcaatcggaacatttcagtatctaaaaggctgctgtcatggcaactgagattagagcgtggtgtcgtttctccagtttttgtgtgttcttttcactttccagtcacagaggaaactgggtgaagaatggaagaattaaattattcatatacatgcaactcatcttcagttagagcagtataaatgtgataaatatgaattacataaatgaagagcaaacaagtcatggtggatctggggtgggggagggaagaaagcacactgcaatttagattcacttctgatcctataccagaggaagctgtgccaccaatcttagccactggagttggcacaggggcccctcaaaggcttggatccaggggcttggatcctgtagtgttggccattctctgtcaagttgggcgttggctcaggatctcaaacattattccttaaggctttcctccccacccccacttcaccctgagaatgacttctcttaagaatgctttcatccttggcacacagaaatggcactcccttgcatgaatgccacccaggaaagtaactctaattccactaactagtggttgcatcaaattaggcatcaatttagaaaatgcttcctactgatgtgagaatacctatttagaaagtaaagatttagtaggaccagaagcttcacctgaaaaaatatttcaacactgaggttttttgacattttatacagtgttttaatttccttcagcctggcttgattatctgagtttgtgaagagtaagtgcctggagagtgaagattattaattttcagcaatcagatgtggctcgtgaggggccacatgtgaaaaccaaaggggggagtgtatgtgtgtgtgcatttttttttttttttttttttttttctggttggaaggttcacaggagattcataagacttgctgtcaccggttaattttcatagcatgcatgcttaaatgtctatttttggtctgtttattctgtttcttcactacacaaagtcatgtaaaacatgataaattggaccttatgaaacctaattaaatcaatgagtgttctactcctttatgtggaaaccacaagtatgttgtaaaagtcgccactcccttaatacgtgaacaaaatcaaaacatgccataattctaagatgtttgagctatatttctgtagcccattttgtggttaagccaccagtgacatgtctgaataagtagatttgatgggttggcttttggttgttaaaacctgcctctccaccttcccctcctttcttgtgaagcataatagccttgtattgaagctcttctttatgtatcctcctagccatcttacagttttgacttatcagatagggaggcattcagctgggctttataaataaacagtttatatgtaaagttgatgggtttatttgatttctggaaaattcaaaaatatatacaaaaactcaaaaatcctaaaagtggctgatacttaaacagaagtgaaaggcacaagaggtcatatagttgtgtctcaatacctattcagggaagagaattatttctgtaatatcatattgctttcattaagatggccctggtcataaaggtggtgtctacaaatggacctgtccataaaggatatcattcattttattttattcttttgtagagtcctttttatacttcaccagggaattctggcacattttctaagtgagtgtgagcagtttaagaacatattttgattaatgagttttgtggacattatgctttttttttttttcaaatatagtgtcccatatgaattctgcctagagtgtagtgtatctactgtgaaataaaagggcagaggggtcacttgctataattaaagaacagagtccattgttgtcggacagcaaactgttttgaaagctacataagaggtttagctgttaaagacgttggtaactaagggtggcgtccaaatcagcattgatccagctccttacttttctataggcctcctcacagggtgacagggctttttgagggagggggctgccctttccccaagaacacatggaacttaggtatttgtgtaatcagacccatcactgaattctgactttggtgtgtgaaatccgtttgctttgctggagagagaaggaatatgcataactgatcaagattgtcctataggagataaataatgttttgcaacttttaataactttgcaaatagtctgtaaaaaacggtggggggagggattgatagtccaaatgtcgtgaggttaagaatgctcttcaagtgaaattgcttggctgcaagatggttttaattagactgttataaagacttatttttcctaagcagcattttatagttagtaaatgaaatgtatgccgaaagtgctaagcagaaatctccctaaccacagaggtgttcaataaccagattcgaacaacatggaaagtaccatctgttcttcgttttcagcgtgaaaaagagggattgaatggctgcgatttgctccagtttcgacggtgtctgtgtgtgcgcgtgtattcttttttaatttaaaaaagttcacctggtacttcatagaaacttgaaattgcagtaatatgagcaacactgtgaaaacacatgttcctgcatttattttaaccagttccacttttatttaaaagatttccagaagcccagccattgaacactttataatggttatacagttcctgcaggcaatcacaatgagcggtcagcttttccaaagatctgactatttagtcagtacttgaattattctgtcaattttccccctggaggcaaggaggggaaaaggctctcacgccaactctggtcagcgtttatcagttaatctaattgtgtgtgatattgctgtggactggtgtttactatacatagaccttgctcttgttcagagctgtaatctaggattgttgataatgaggaaaatatccttttaaggaagggtaacttttgagtccttgacttttagacactaagaatcttggttctgggtttagttagagccctgggtaaaacattatccggcctttgtttgaggtcttttattgaagctaatgactgggcttgtgcctccctgagataaatgacattatctctgagtggcctgacaggaaacagacatgttaatggtgaagctgcggggaggatctgcttgggttctgacaaaagagtcgagaaagggacccctggttgtggtcattaacacataatgcattcttgctcttcctaagaggcccttgataattggaaagctattttagccacaagcacttaaatcataaatctactactcctagttctttgcattcttaaaagtagcaaagtaatgtgttttttgttaacaagtgtgtgatctggttttttaacgtggtggcagctctaggctgcctgggtaatgacgtgtgggagagctgcacgttgaattgtttttatcagttgagatccttctttgtctttcagcattgctcagccatccctctactttaataaagtgaaaagtgggtacagagctgaaaataagtcatttttatgcttgaagatgtcttgtgggagggggataaaatctgtttcataagatattgtgcagtgatttgaatgtgatgaaacctgacttggagtgtatgttttcaaaagtcatgagtataattgagtttcaatgcagtttaaactctctgcttcttgaaggaagataattgccacgttgaacacactctagaggtgtagaagaggtggcaggatcatgttattctattctttaatattaagcactggaagtttttcatagtaattactgcagcacaacatagttttgattgccagcactctgaacttgccagcaatctgaacatcaagggttttgcttgaatacaaaacactttattcctaaattacttgtattacattcctgtgttatatggaagtcagaactaaggaaatactgggctatccttgttagcaacatcttagggaaaataacccttcttcgctaggattcttgttgataaatgatcataatactctcctaatgtagtcattgaagattaaagggatggagaacaggtgagctccctgcctcagtgatgacttagactgtcattagagagtaagtaatatgtgtatgatattggtgccctgtaactggtatgtcataggtgtgtgtatataaatgttgtaactgcatatacagatgttggattgggagtatttagttagtatgggttttattctttaaaaaatgttcactgttggttttacgttccactctgttgcagaatatatggacctctccctctgtgtctaattctttctcccaactgcagtttcactagtgactacttgctccctgtcacaagttctttttaatttaagctcaaggttttggcaatgggaacaaagcctttgcaactgaatgaaaggttgttaaactattcatagttgattgaccagcagttgggctgtttgtaatgttattttgagagctcaaaggatatgcaacctcttgcatatccaaagtgagactttgctcctaaagctgaattttgcatatttgctaaatttttcttggaaatacctttgggaatgtagtagaaaagatgatgggttttgccttaagaactgaaatgatcacaaagcaaatacttatattttgctaggtctgtgggccttgaaccacagggatcccatctggtattcagaaggcttttccccccagtgaaactaaatgaaaacttaaaggtatatattgtaactgtaataaagaactcaaaggaaaaggtgtttcggttagaacaaataggtttgaaatgatgaacaaatacttctgtggatttttcaaagccacttactcttctttctcatttccaccccccgacctagtttgaatatcattcactgtgactattccaacccaactactgagctttctgcctcctgggaatcctcattgtcagctagcaccttaagaaaaatgtgtctgcagggacatttaggcatattccaataatgccacatgaatgtagcttttacagtttaaaaagcaagtaaaaatatattgattatattttgtgttgtacataatgatttcagaaagcagatatttaggttgtggaattggcttattatgctaaccagagagcagatggcatggtgccacagacgtataattttacttaaagggacttttaaggttttgatgtgttttcttttcctcttatttccctgatggcttcttttcattgaagggtaacttaaggagacctggtagcaattttactgccttcccctgacagtttgaaataatagcttggtctttggttgcactgatcttctaccagtcaactcgattctggtttttgtcatgtggcagagaatttttaaaaaaagtgttagtagtatgttttaagaagtggactcttttatatgcctcaattagcaacagacgacaaagttccaattggtcacactttcataaactcctggaagtcactgtttgtccttttgattaaagaaaactcctggtttagtttcttaggaaaagcacatctggccctctggccgcttttggtatacctttttgtccttcgcattagtcactgaaggttcaaaggttgtgtctaagttgttcctagttaggttagaaaattttccccatgctggaggaaatgtacttttttttttttaaactacactcatcatgtgtttggattcagctggcataaaagtaccttttgtttttgtacctagattttacagttttatccattattcacctcacacatcatcaggatgagttggaaagcatcttctaacttttttttccaaagcgtgcatagccagaccagtttacttctggatttcctgtcacttccttggctgattttatggatggctcatgttaaaaacaacaaaaatgtttgaactggaagggttgaagccttgggttttcattcttcatggagaactgtttatttgtgtgtggttcaccacagtacatggataatgctatcaaatctgtgctttattataggcttatgactagcacagccgcactttagttatgtgttcccgtgctttagttatttgccaattcttttgtgatggaaatgaaattagagctgaatctttgcaacgaaggggaaaataggcacaacaaatagaaactatcccttgagccagttaagaagtaagcagtggtgattaaacatgttttttttttttcaaaataagtgaaacacagaggaaactacttccttttagcttttctgtgaagttgtgtggaagatgagctcaacattttgagaagtggaggctgcagctagattttatccccttgtatcgtttgacatcttcagtaattgaaaagcgattcgtattcccaaatttttaaacttctctaaaggtgtaatttgagttaagtaatattgtttgtttctgcccccaaaagggagcaacatgatgttaaaacagagcagttgagcctctccgcatccaactccatttggtcaattgtctccatttacattccctgcccaaatctttcaccagcctttcccatgatgccgcagcagatgccagacactgaagtagaaagggagcagctgtttccaaacattactccattgctgtattatcctccacaatctgctttcttttgctctccccttcccccattcttaaaataaagaagccttctctccctttgacttttgcatcctccagtttatcagtgtgcaggttttctatcttatcagtcgcactggtttcttcagcaggtccctttattgttttcgctatgggagcagatggagggccctgggctcctgggggcgtggccgctggcacctcgggcccggggctgcgcgttcccgacggggcggcgggggcgtgcagccgggaacgcgcccttcttcccgccagggacccgtttatggccctgagcgctgtaaatctgtcagctcttcacgacgccttcacctctttcttcatttgctccagcttctagtttgacaacgttcccctgaggcagaattctaatctgcttccaattagttgcaaaatgtgactgaaatttccacattatgactgctgttttacttgcacgcacacatctagaaacaaattaatgctcttgaatatttattttttgagcccttggatttactttaagaggaagagtttccaactgtttggaatgacttccaggatttgcattttttcccgaaagccgaatatactgggtacattaaaacaaaacaaagcaactatggttgccccccatcacttaataagacttttccatcttttcaagatttcccaaaatgtattgcatatgtttaagtaatgcaaataaattttgtagtatttctaaaataaaacaaggatgtttggctaaggaacggtccctatgcagtgttttaataaaagagaaatatacagacacatttccttctaaatatagtttaagtatactttggccaaaacacaaagacttttgttccacacgtttaaattctttcattcaatattcaaaagctgtaaacccaaataaacgaattgagtgattaattggcttggcacaaatctaagggtagcattaaataagttactgtgggcattaatgtgtacccaagtttttgtgtaggtctctggagcacaccctccctcagcgagcggctggggtggttgtactgagatcagtatagtaggtgggttcctgtgactttggtcttcccagtccctccgtacgccagtgttaggagaatggacctagttctgggcttcggggtggttctgtatagagggtgatcatcacttatcaccccaactccatttcctctctttcagtgattttttttaacaaagatgttgatccccctgattatatgtaaatattagagttgtttaaatcttggttgctgagaatgtcaagttaagacaaccattttattacttgccttaaagactgctttctcaagtactggagaattttagtaccaaggcagtggattagtatttgtgaaaaggtgctactcttaatgtaaacggcgaaatttactggtgccttttatagtagaatttagtcctcaagcatcttggcagattgatatcaacagtaataatgggctttaaagaggtgtgaaggattttattgatggtaaagtggttatgttgatcgcatcactgtgtattagtttctgagtaagaactgcacatgtaaatggatgcatgagttttttttaaacatctttatcatatataatcataaaaccctatattgattgatttctaatgctcttttatgtgccactttgaatctctaatcaggaggtggagaatttatttcattttgtttcaacaaaacctattcaaaattatttcttagatatatagggtatatgttatttaaatggttttctaaaaacttatttttagatatgccagaattccacaaaagaagtcggagtgctctttgtattgcttcctttcttcttactcaatgactagtagtagaaaaaaacagccagattgaaatccttaaaaatttaaaatgttgggccttcagattgcagagacctcctgggttaaaaaaatgaaaaaattagtggccctgtagtgaaatgctcacaatagcaatgattgtggtagcccctcaagtcctggggttcactaattaccctttaatgaggtcagtctgccccggctttttccctaccttgggaggaaaagcacacaagacagttggagttcaagtggatcttgctgtatttgcaacttagcataactgctttgaaagcccccagggtgcttaattggggcctgggcatttttgtttggggagagactacacacagctcctcattgtgcttgtagaagccactgtgcatcttggaagcattacatgcttttgttgatggtgcatagttttataaactccaaatgagcttattgctttttaaccattgggagagctaaataatggaagaacctagaagtctttgggttgggtagccgccaaacagaaaaaaaaaaaaaaaaaaaaagagagagagatagagagaatgaatggtttaattggagagcaaaccatttgtttgcagattaagatttacttggtcgccaaatcctatggatgaggtgaaagaatgaggccgtaaggtacagaaattgaatgcccagtgttatgttttgtgatcatgctcagctgtttttaccctttttttttttcacaaagaaggcaaaagaagaatgaattgtttaatggagagaactgcctagccaagtgcatcttttaagctgtatagagggagggaagaaggtggggaggcagattatttctgtgctccctggtcaggaagcaaaactctcaaggttcttttagctgagagaggggctagaagacttgctgaatcttcctgtttgctcacttaaggaggaatggtggtggtggagctagggagtaaaaagtagaagaaaggtgtgtgggaaagagggtggttggggtagagcttttgttgcaagggccctagacaatgcattctcttgaataattgggaccatttatagaaattccccatgatttcattagttagtagccctgtttctgaatagaaagggactctccagcaacagcagtgaagtggtacagcagttttggagggggaaaagcagttgcctggcagcctgaatgtcagtatgtcttttttttttttttttgaacaaacaaaaaaacccctttcctaaggactagaagaccagaaatcatggcatttgtccatgttgtagttgcagtttgtccttctaatcttattgtgaataaataggtttctggaaagacctagcattattttctagaagtatcattctaaacactcctcaactcactgtttttatttttactttaatcttgggagtgaaaccctttatcttaatctgctcttttgtgtataaactgtctctctttttgataactcaggatgcatgccatgaaaaagcccatttcttctgtaacattaaaatcatttgtttattgatgcatatttgatacattgaacttttaaatatctgaattggctttaggtgatcttgttttgtttttctcctagctttaagttctggtattatttattattttggtatcatgatccttttgaaatggcatgatttttgaatccaaataatggctgatagcttcattttatagatctatttcttctgaggggcggtgaacaagaggattgtaggaattggggagcaaagagagtgtaaaaaattaggtctaagtagtttcagttttgtcaaactgctacttactttttaatgtgccattgctcattcctgattctttcctgttaatattttccgtattagtgaggaaagagactggattttacttctgttaatgtctaaaactccaaactttttttttgttttttgagatggagtcttgctttgtcgcccaggctggagtacagatgtggcacgatctcggctcgctgcaacctccgcctcccgggtccaagcgattctcttgcctcagcctcccgagtatctgggattacagacacccaccagcacgcctggctaattttnnnnnnnnnnnnnnnnnnnnnnnnnnnnnnnnnnnnnnnnnnnnnnnnnnnnnnnnnnnnnnnnnnnnnnnnnnnnnnnnnnnnnnnnnnnnnnnnnnnnnnnnnnnnnnnnnnnnnnnnnnnnnnnnnnnnnnnnnnnnnnnnnnnnnnnnnnnnnnnnnnnnnnnnnnnnnnnnnnnnnnnnnnnnnnnnnnnnnnnnnnnnnnnnnnnnnnnnnnnnnnnnnnnnnnnnnnnnnnnnnnnnnnnnnnnnnnnnnnnnnnnnnnnnnnnnnnnnnnnnnnnnnnnnnnnnnnnnnnnnnnnnnnnnnnnnnnnnnnnnnnnnnnnnnnnnnnnnnnnnnnnnnnnnnnnnnnnnnnnnnnnnnnnnnnnnnnnnnnnnnnnnnnnnnnnnnnnnnnnnnnnnnnnnnnnnnnnnnnnnnnnnnnnnnnnnnnnnnnnnnnnnnnnnnnnnnnnnnnnnnnnnnnnnnnnnnnnnnnnnnnnnnnnnnnnnnnnnnnnnnnnnnnnnnnnnnnnnnnnnnnnnnnnnnnnnnnnnnnnnnnnnnnnnnnnnnnnnnnnnnnnnnnnnnnnnnnnnnnnnnnnnnnnnnnnnnnnnnnnnnnnnnnnnnnnnnnnnnnnnnnnnnnnnnnnnnnnnnnnnnnnnnnnnnnnnnnnnnnnnnnnnnnnnnnnnnnnnnnnnnnnnnnnnnnnnnnnnnnnnnnnnnnnnnnnnnnnnnnnnnnnnnnnnnnnnnnnnnnnnnnnnnnnnnnnnnnnnnnnnnnnnnnnnnnnnnnnnnnnnnnnnnnnnnnnnnnnnnnnnnnnnnnnnnnnnnnnnnnnnnnnnnnnnnnnnnnnnnnnnnnnnnnnnnnnnnnnnnnnnnnnnnnnnnnnnnnnnnnnnnnnnnnnnnnnnnnnnnnnnnnnnnnnnnnnnnnnnnnnnnnnnnnnnnnnnnnnnnnnnnnnnnnnnnnnnnnnnnnnnnnnnnnnnnnnnnnnnnnnnnnnnnnnnnnnnnnnnnnnnnnnnnnnnnnnnnnnnnnnnnnnnnnnnnnnnnnnnnnnnnnnnnnnnnnnnnnnnnnnnnnnnnnnnnnnnnnnnnnnnnnnnnnnnnnnnnnnnnnnnnnnnnnnnnnnnnnnnnnnnnnnnnnnnnnnnnnnnnnnnnnnnnnnnnnnnnnnnnnnnnnnnnnnnnnnnnnnnnnnnnnnnnnnnnnnnnnnnnnnnnnnnnnnnnnnnnnnnnnnnnnnnnnnnnnnnnnnnnnnnnnnnnnnnnnnnnnnnnnnnnnnnnnnnnnnnnnnnnnnnnnnnnnnnnnnnnnnnnnnnnnnnnnnnnnnnnnnnnnnnnnnnnnnnnnnnnnnnnnnnnnnnnnnnnnnnnnnnnnnnnnnnnnnnnnnnnnnnnnnnnnnnnnnnnnnnnnnnnnnnnnnnnnnnnnnnnnnnnnnnnnnnnnnnnnnnnnnnnnnnnnnnnnnnnnnnnnnnnnnnnnnnnnnnnnnnnnnnnnnnnnnnnnnnnnnnnnnnnnnnnnnnnnnnnnnnnnnnnnnnnnnnnnnnnnnnnnnnnnnnnnnnnnnnnnnnnnnnnnnnnnnnnnnnnnnnnnnnnnnnnnnnnnnnnnnnnnnnnnnnnnnnnnnnnnnnnnnnnnnnnnnnnnnnnnnnnnnnnnnnnnnnnnnnnnnnnnnnnnnnnnnnnnnnnnnnnnnnnnnnnnnnnnnnnnnnnnnnnnnnnnnnnnnnnnnnnnnnnnnnnnnnnnnnnnnnnnnnnnnnnnnnnnnnnnnnnnnnnnnnnnnnnnnnnnnnnnnnnnnnnnnnnnnnnnnnnnnnnnnnnnnnnnnnnnnnnnnnnnnnnnnnnnnnnnnnnnnnnnnnnnnnnnnnnnnnnnnnnnnnnnnnnnnnnnnnnnnnnnnnnnnnnnnnnnnnnnnnnnnnnnnnnnnnnnnnnnnnnnnnnnnnnnnnnnnnnnnnnnnnnnnnnnnnnnnnnnnnnnnnnnnnnnnnnnnnnnnnnnnnnnnnnnnnnnnnnnnnnnnnnnnnnnnnnnnnnnnnnnnnnnnnnnnnnnnnnnnnnnnnnnnnnnnnnnnnnnnnnnnnnnnnnnnnnnnnnnnnnnnnnnnnnnnnnnnnnnnnnnnnnnnnnnnnnnnnnnnnnnnnnnnnnnnnnnnnnnnnnnnnnnnnnnnnnnnnnnnnnnnnnnnnnnnnnnnnnnnnnnnnnnnnnnnnnnnnnnnnnnnnnnnnnnnnnnnnnnnnnnnnnnnnnnnnnnnnnnnnnnnnnnnnnnnnnnnnnnnnnnnnnnnnnnnnnnnnnnnnnnnnnnnnnnnnnnnnnnnnnnnnnnnnnnnnnnnnnnnnnnnnnnnnnnnnnnnnnnnnnnnnnnnnnnnnnnnnnnnnnnnnnnnnnnnnnnnnnnnnnnnnnnnnnnnnnnnnnnnnnnnnnnnnnnnnnnnnnnnnnnnnnnnnnnnnnnnnnnnnnnnnnnnnnnnnnnnnnnnnnnnnnnnnnnnnnnnnnnnnnnnnnnnnnnnnnnnnnnnnnnnnnnnnnnnnnnnnnnnnnnnnnnnnnnnnnnnnnnnnnnnnnnnnnnnnnnnnnnnnnnnnnnnnnnnnnnnnnnnnnnnnnnnnnnnnnnnnnnnnnnnnnnnnnnnnnnnnnnnnnnnnnnnnnnnnnnnnnnnnnnnnnnnnnnnnnnnnnnnnnnnnnnnnnnnnnnnnnnnnnnnnnnnnnnnnnnnnnnnnnnnnnnnnnnnnnnnnnnnnnnnnnnnnnnnnnnnnnnnnnnnnnnnnnnnnnnnnnnnnnnnnnnnnnnnnnnnnnnnnnnnnnnnnnnnnnnnnnnnnnnnnnnnnnnnnnnnnnnnnnnnnnnnnnnnnnnnnnnnnnnnnnnnnnnnnnnnnnnnnnnnnnnnnnnnnnnnnnnnnnnnnnnnatgtatatgtatttatcatatatcaattgctgtcatatttgattattgagtcttcagcatttaaaaatggctaaggaacgagtttgaggttgtcttgcatggtaacgaagataagcagaaggccagacatgttgggatagtgattttcagattatggaaaatctgcgtaagataggtcaagagaaggtgcttcctgtggaggagtgagtactgtacatgtctgtgaggccattattattgccagcagcatgggagagctagataaacaaaatgtcagccaccccaaagcagaggtgatctttgctttgatccccttggctaaattcctcctgaaaatatctttctgatatgttcctatccacctaaagcctatttttttctccatttatcaagagctttgccctccaataccaacctattgaatgacccttaaggtgattttaagatagcacctcaatcccatcgtgagtcgacttttcaagaccaaggtatggaattcaaaggtagggactggtctgataggaggagaggcataagagctttcctggtgtcttaaatcacacctttgggcagtcatctcttctgcctatttgtaaagctgtgtttggagagaacctcctttacagatgtttcttaagatacttggggcccggcacagtggctcaccccctgtaatcccaggactttgggaagccgaggcgggcagatcacctgaggtcgagagttcgagaccagcccgaccaacatggacaaaccctgtctctactaaaaatacaaaattagtcgggcatggtggcacatgcctgtaatcccagctacttgggaggctgaggcaagagaatcgctttaacccgggagatggaggttgtggtgagccgaggtcatgccattgcactctagcctgggcaacaagaatgaaactctgtcttaaaaaaaaaaaaaaaaaaaaaaaggatacctggagctggcaacaagatacaactgatgaggctgaagctgtatctgatgtgtgtggttttttttttttttttttggtctgatttttttttttaagggacttttataactaagaagtgaagttcaataaggacctaataagaaaatgagatcttgaggattgataccatcttgagagtagtatatatgttatatatttcttttttccatatttgttaatatctttttacatatacattcatttctagaatttctgcatatttctaacatacccaatgaaattgatttgagaaagagaaataatagaagtagtatgcataaactgacaaagatactgtgagggcagctatacaaggtcaagaccaactggaatcccaaggacagaagtcagaaagataatggatgtgataaactcagtacagcctgtataagcagtgatacttttttatttcctctgaagccttgacttggggagaggagagggttttagagttgacagagcacagggttgtgaaattttctattgaaaatcctggcacatttagaacacagtggagaagaaatttactggaggagatttgcccacttgttgcaaaactctgttgctgtcactgtaagacctttggtgctaggaactataggtaaagggatgaagttgaagtgtaggatctcactgtgattttgaagctctgttacagggtagaggcctgtgttaagtacaagcttgagatgggagagaaagagcagatacagcaactgatgctgaattgagagaggatccaaagcccggaatcccagttggttggatgtttgcactttttttttgtctggagatgcttcctagtctgtttcttgaccgactgcacatgctgttaaatccactcaggtaacacatatgtgttgggcgcacagcccatgtccagattggactcggagttgggcagaggccaggtcatgcagggccttgtaggccatggtaaggaatttggattttagcttgaatgcgatgagaaaccatttcagaattttgagcaaggcagtgacttttttttttttttttttttttaaacaaatcttactgttgactgttgtatagagaattgactgtagagaggcaagaagaggacaagggaaatcagttgcaagactttttcagtggtcctggtgagagaagataggcttctttggtaggcatggaagtggtgggaagtggcaagaaatggtcacgttgtcctgagataatgaggatatggatatatgtggagttgtgaaagaatgagaattaaggaaaatacctggattttggaggtggatggaatcaagagttgtgactcatttttgatatatcctgtggctgccaagtgattatggtccttccacaggaaggccagggctggagacacctatgggcaaataggtgggctttaaagttattgggctggaagaggtcacctctagagttagttccaatggaaaagactagggcccagaggtgggctatggagcagtaggagccagcgccgtgtccattgagggggaagaaaacccagccagtctggtgtttctggaaagcaatggaagaaattctagcaaggaaggtgtgatcagctgtgtcaattgctgccaagaagtcaggttaaaatgagactcagaattgatttttggtgacattagcacaaatcgtttctggggtaaagggtagtgatggggaaataaaaagtttgattagagtgcttggattttttgtgggaggtgagaaaaaacaggacactatgaatatagcacccttttctataaggggcaaagagatcagggaatatctgtcattttttaaagtggagaactctcacagcctgtttgtatgctgatgggaatgatgagagaggggtggagaagagctgtccatactagagagagagaggagacagtgtcctgaaatagggtgcatccatgggtctctggagctaggacagtcctccattataacaggagaaagtcagagaatatgtacagatttaggagtggtacagttttttctaggaaaaaactagagcgttttcattttatcactgtgcagggtattgttgctgtgttaagggattaaaaaaaatacacatgtcatagacagcagttaaatattcatttccttgcctcctcctacagtttagaagctttggccattttgtgttctgacagcaaaaataattagaatgggggaggtataaaagcaggtctcaatctgttctttcatttgttcattcctttattcattccttactttgtttacccagcaaaaatacctagtaaaaatatttcctcagcaaacatttttttgaatgtctattatatgcctagcacagtctgggtcctggaggtacagtagtgaagaaaccaagtctctgctatcatgaagcttatattcaaatttattccagacaaataaatatattttggttggcgttacgtgctataagggagaatcaagcaggagaaggtggtagaaagagatggtggaaaagaagaattttatttgtttatgtttgagtagggacctgagtacagttaggagccatttggcccccttgtggagggaactttttagacccaggacctgtgtacaatccccccgggggtcgaggagagggagagtgtatttggtgtgtttgaggagacaccagagtgactgaagctggatgagggagagaggagagttccagaagatgaaatctaagatggagcttgaggccaggctccagagagccttccagaaccaagtaagactcagaaaggtgggagagactggggggctttgcgcagaggagggacaggctgtgacttaagttctaaacgtatctcagtgtgtgggaactgatcctaagcttaacctctggcttttgatttcattctcatttctcagtggttgagggagatgatgttaccccgtgtgaattatattaactgatttcacatgcaagatcgtaaatactgagtcctttttcagagagtggacaaaatggtacctttctctgaagacattaattgaaagagtattactttccccagagaacgtattccaggtgtctctggttgtgtacacacacacacacacacacacacacgtgctgttgaattaatatagctgatgtttactaaagttacaaataacaaaaaattggaaatgatgaggtaataatataaatagaaatgccagtctttttttttttttttttttgcactctttgcatactccctgggtttgaccatgtctcctacttaggagactggtccagagccctgagaaattagttgcatttattactttttgactattttttttaaattaaaaaaagaggtcagaaattggtaaaagttcaaactacactaaaatgttatataatgaaaagtaggttttacttcccccttatgccccccagactgttccctagagccaattattttgaacagttttgtatgtcctcgaaatagtccccgtatgttcaagaatatatatttatatttttgtccccttatacaaatcacagcatattaaagaaactgatctgcacctttaaaatgttcctttgaacatctttgcacatgtgtgtttcaaaatttaattgccccccaacttgattgcatccgtttgcattcccagcaatggtggaacatgaattgcctgtaatttctacaatttaatactgtgagttataattttctggctttaatctgtgctaatctgatagtaatctattattttaatttgcatttttcatgggtacaagccattgtatttattttcctaaatattgataatttataacctttgattatctagtgagttgttggccatttcttattttaaagtatttcagtgtataataattaaatatataattttttcatgtgttttgcaaatttttttatgtgctttgcaaatattttttcccatctcttcatttgtcgtttgattctgtttatgctgttcctccccctactccgtgcaaatatcttaaactgtatagtcagattcattgattgatggagtcagcgtctcactccatcaccccaggctggagtgcagtggcacgatctctggtcattgcaacctctgcctcctgggttcaagtgattctcctgcctcagcctctcgagtggctggaattacaggtgcccaccaccatgactggttaatttttgtacttctagtagagatggggtttcaccatgttggctgggctggtcctgaactcctggcctcaggtgatccacccaccttggcctcccaaagtgctgggattacaggggtgagccactgnnnnnnnnnnnnnnnnnnnnnnnnnnnnnnnnnnnnnnnnnnnnnnnnnnnnnnnnnnnnnnnnnnnnnnnnnnnnnnnnnnnnnnnnnnnnnnnnnnnnnnnnnnnnnnnnnnnnnnnnnnnnnnnnnnnnnnnnnnnnnnnnnnnnnnnnnnnnnnnnnnnnnnnnnnnnnnnnnnnnnnnnnnnnnnnnnnnnnnnnnnnnnnnnnnnnnnnnnnnnnnnnnnnnnnnnnnnnnnnnnnnnnnnnnnnnnnnnnnnnnnnnnnnnnnnnnnnnnnnnnnnnnnnnnnnnnnnnnnnnnnnnnnnnnnnnnnnnnnnnnnnnnnnnnnnnnnnnnnnnnnnnnnnnnnnnnnnnnnnnnnnnnnnnnnnnnnnnnnnnnnnnnnnnnnnnnnnnnnnnnnnnnnnnnnnnnnnnnnnnnnnnnnnnnnnnnnnnnnnnnnnnnnnnnnnnnnnnnnnnnnnnnnnnnnnnnnnnnnnnnnnnnnnnnnnnnnnnnnnnnnnnnnnnnnnnnnnnnnnnnnnnnnnnnnnnnnnnnnnnnnnnnnnnnnnnnnnnnnnnnnnnnnnnnnnnnnnnnnnnnnnnnnnnnnnnnnnnnnnnnnnnnnnnnnnnnnnnnnnnnnnnnnnnnnnnnnnnnnnnnnnnnnnnnnnnnnnnnnnnnnnnnnnnnnnnnnnnnnnnnnnnnnnnnnnnnnnnnnnnnnnnnnnnnnnnnnnnnnnnnnnnnnnnnnnnnnnnnnnnnnnnnnnnnnnnnnnnnnnnnnnnnnnnnnnnnnnnnnnnnnnnnnnnnnnnnnnnnnnnnnnnnnnnnnnnnnnnnnnnnnnnnnnnnnnnnnnnnnnnnnnnnnnnnnnnnnnnnnnnnnnnnnnnnnnnnnnnnnnnnnnnnnnnnnnnnnnnnnnnnnnnnnnnnnnnnnnnnnnnnnnnnnnnnnnnnnnnnnnnnnnnnnnnnnnnnnnnnnnnnnnnnnnnnnnnnnnnnnnnnnnnnnnnnnnnnnnnnnnnnnnnnnnnnnnnnnnnnnnnnnnnnnnnnnnnnnnnnnnnnnnnnnnnnaggcaaaaggactaatgatttgcagctccagccctaggaatatttccagccggtaaatacacttactgatgtttcccggaatcttagggcagaaacatccctgcacaaatgaattgcttaagtagtaaagatgagccatagctttgcttagttagccattttggtttagtagaatgtagataattgccatggaggcagggggaaacgttttgggagtgtataaagcatgaagttgtaagtattactgctataggtctgatctatgcaggtcatctcttctagtcagctgggcttcagaaaattgccatgttgctcttgtgctctcagtgtggaggtagccagtaagtcctgctgatgttggccacatgtggcctttaggtagattgttccctcctgcagaccttttactcttgatttctacctgggtcatgatccagggagagaagctctagaactgggaattgggggactggtcccacttgatgatttggctttgagttccttttttttttttttttttttttttttttttgagacagagtctcattctgtcgcccaggctggagtgcagtggtacgatctcggctcactgtaacctcggcttccttggttcaagcaattctcctgctacagccttccttccgagtagctgggatgacaggcgcccgccacctcgcctgggtaatttttgtatttttaaagtagagatggggtttcaccatgttggccaggctggtcttgaacccctgactcagacgatccacccgcctcagcctcccaaagtgttgagattacaggcgtgagccactgtgcccggcctggctctgagttcttttatgacccttgggcaacagctactggctctgagccttagttgcttcttggttatgttgtctgactatctttactgttccaaaacagttgtaatttcccccatttctatttattgctctggaaacacatgtcgtttatctacacttttgctgttttgttctgtggtgtgtgagcgcatgtttcccctgccagcctggaacccctgagggcatggatgccatcttatttgtttttatctccccagcgcctagcactgagccctcttacaggaaatgctcagtcaatatttgttgaattggattctcttttagtagggttacagaggaaaaaagagccttaaaactgtctccatggggtccacatcttttgtcttttcttccatgtagagatcgttggcaaaaacattgatgggaattatctatcttgcatttatgtgacatttttaattctttaacagtattgtcatctgtataatcagttatattgcacctggtttccccagtttggtagagcatgcctattgagttttaaagaataaagatgacttattcagaagggtcatgctctcagaataacaaactgtcatggcatcctgtttgcaaaaatctgcattaggcagatttttgtctgatgatttctttgttatccacatgactttcagggctaaaatgaaatgctacttttttctttaagtcattattcaaaagtaagagagaagcgtttattataacatatagcttaggtgtgaccttgggaaagttgtttaaaccaagttaatgatttaatttgcggggtgggggtgggggagaagataaagaaaaaggaaaaaaaagccagcccaggagttgggagtgtaattagatattatgagctcaggcatgaatttggcccctttatctctgttgaaatttgtgtaagaacatgaagtgcggcccattctgacactttaatcataggtcattcatagccataattgttgttgaaaagaacagtggttggatttatttttacctggaagttgcccgttaaacacaacatgttattaaaatttatttttccaaaaagtatacttttcagtatacatttaacagattgaagctatacatgtttaccatgaaagtctgtttcacctgaatgaattccggtgttgctgtgttagatagctatagcatggttgtggtttttgtagagcctctactaagttttatatttcttaccattcacaatttttgccagaaaagtggtagaaaaaagaaacttcataatcagaaaggtgatagagaaacctcatagtcagatatattataaaagaagatgatgacacctattaacaagaaatctaacatcttttgtggtgagcttctaatacagtatcaacaaagcctaggaagagtttcctttttgagacaccccgcttgcccccaaatacattcgctcagataaattacttactgagaaggctatttcttttctaaaataaaaaatacaatgaataatttgtaatctctatacagtgcctggcatctagctgcccaaggaacatttgttgaattcagtagcaccttaaattatgtttaagtacttccaaagccatactcctgttggttgttttgttattgttgttgttgttgttttgacagacttcaacgatcataagagagtatgtcattgctctggctcacaggtgaagaaactgaggtttagaatgaatgcctgtgcttttagtctagcaaatgtttattgagtatgcattgtaatgaagaagaagcacagctcttgcccttgaatttgccactgggtcagttctcatctcctaggtaggttaggattttactgggcatgtatggactctctctccaggaaaaggaagagagaaagtacacaaacgcagaaacctttgcttctgtaattacaaggtttctgaggccccacaaatctttgaaccccagattaagaatctttgatccccacataaagaatctttgatttaaccattgcttgtcaacaagcccttgaattaagtaactgacttagggggcaaatagcttaactactgagaagcaataggaaccccatgcttctttttcctctcctaatgtttttcccaccaccccatgctgattttgaagtggtgaacaacaaatgaagtaacaggaaaacactttgtaaatatagtgttctacagatatgaatgcaaacaaatctgtaagtggcagggaaacccaggccacacatttcgcagtgtggcttatgttcatacattagggagcctgctggaaccccactaaactgttagttgccagctgtttggtttagtctgatcatttacaaaaatatagcaatcctcactggtgtgtgtgttaaatacagacatcactgaaacgaacgctgtgcctgtgacatacatttttgcaagtgctttctatgtatgggttgtcagagctagtttaattctaattgcagaaatatcagtgggatttatatctgtcttcttcaaatagttggaaagaaaaaatgtaagcacttggcacacattttgatttttgttctacattgaaaagaaccatgttaatttcaagaaactcattaatgtgcaggtccgtactagtagtttctcttagttacatattggtggaaggcagaagtattaaaaatggcatatatgtaatgagattttacaaaatttctgattttgagggtagagaaaaagccagtggatttcctattgtgcatgttaatttaaaaataatttaataatgactccatttgtttcattccagcattaaaaagggacatggagaaggcttgcctgtctttattcaccaaatagcggttttgcagacccttacaagttcccatatgctagtgaaaaacattttccaagaaattggcagcattgcactttgtagctgatgccagcttcttccttgggccaattcaacagagaagagaggaaaaaaaaatgccttgttttagtggctgaattactctgacaagctttcacatcgcccctcctcttattaatattctttttgatgtgagcttgtaaaacagaggattggctgttaatctccaagatctcaagggcttttggcagtggcccataattgatgtgttcacatggctgttgtctgactactaatgattagacagcagtgttatctaccagctaaatcagtgttgcttataaatcacacttgataaactgcagtttcatttcttcaaagagttcgtacaattctgcatactttgatggaagtgccagaggcatttcatgattctttgacagcttagattaggtttatttttcatttctgtttgacaaaatattagactttttaacgcatgtgaaagagaatttttttgttcccctaacaaggcatttaaagagtgctaagcagagaaagatgacctgctttcagtgggaagatgtacaagttgggatggcaggtcccagttttgcttttgctacctactccaaggtaaatggaatggggccatggcatctggtgccatgccactttgaaagaagaagagaagaggccaccagcaaggaagtttgcagaatgtgggcctgtgctcagattgtgacagggtggagtagtgagagagcaccaattgctcagccatgttatgtgttgagcccctgcgtcaaggtgtgattctgctttatagacaggcaagagaaagcaaaaaggatttataagaggaaaaggtgccagccataggattcattttcctccttcgctgcccctatagggacacttgcctggccacagacacacccagagtcccccatctgtccagaactctgtgtactgcagagatgaaaccaggttgcatgtcgcatgcacatggtgggctttgagaacttctgctaagttttgggtctttattggctacaaactcctgtggtcttgagttaactttcctcatttataaaactaaaacaacaacaaaaaaggactaaatgatatctaagctcattttattgctctttattttgcatgtccttggactgtattgtttcagagcctcaaaaaagcctttttgctaacattagttaatctttgcttaatttttgagatcaaatattagattgcaaagaaatggttaaatcagaatggtttgtgatttttaaaaaatgaatttatttatttatttatttaaggtggagtctcgctctgtcgcccaggctggagtgcagtggcgcaatcttggctcactgcaatttccgcctcttgggttcaagcaattctcctgcctcagcctccccagtagctgggattacaggtgcttgccaccatgcctggctaatttttttttttaatttttagtagagacagggtttctctatgttggccaggtgggtctcgaactcccgacctcaggtgattcgcccacctaggcctcccaaaatgctggggttacaggcatgagccattgctcctggccagcaaaaatgaattttaaaaatcacatttcttttaagagaagtttatataattttaaaatgtgtcagagggtaaatatttaatcaaaatttactttattttgagatggagttttgctgttgtcgcccagactggagtgcaatggtgtcatcttggctcactgcaacctccgtctcccaggttcaagtgattctcctgcctcagcctcctgagtagctgggattataggcatgcaccaccatggcccggctaattttgtatttttgtagagacggggtttctccaggttggtcaagctggtctccaactcccgacctcaggtgattcgcctgcctcggcctcccaaactgctggaattacaggcgtgagccaccatgcccggccaaaatgtacaacttttactcagaataaaattatgttctgtgaccaagattgggagtggggctaataataacttattaaagtttaaagagttattagagctctagaatgcaagaatgcaggagaatgcacttaacactaaagctacctgaaaaaatttcacctatcctaccctaccccactccaccaaaacaaaagtcatgtaagatttaactgagtacttccttttatatccagtacttttagaccttaaatctaggtggcaagtttatttcccaacttcctaagagtggctttgacatgagcactactttttcctagtatattttagggctgtaattaaaataagcactatagtcagggaataaatgtttattgataagtattaacattgatgaacaaaggtgcttaactaagctgcttatttaaatgacttgtggttgaaggaaatcccctctttttttttttattaaatgaaacaatttaaatttaagttgttttggttatggttattagattttaatgtgctatggaaaaatacccatgattaacttagagaagatagccattcagtgatttaaatagatgcttcatttagttttgatacgtaaagcaactatattagagtttctttcttttctttttttttttttttttttttgagacggattctcgctctgtcgcccaggctggagtgcagtggcgcgatctcggctcactgccagctccgcctcccgggttcaggccattctcctgcctcagcctccccagtagctgggactacaggtgcccgccaccacgcccggctaattttttgtatttttagtagagacagggtttcaccgtgttagccaggatggtctccatctcctgacctcgtgatccgcccgcctcggcctcccaaggtgctgggattacaggcgtgagccaccgcgcccagcctatattagagtaatgcagctataaaatatgagaaaaatgcattaaaagttatggagtatggttttcattacgtaagatatgtatgcataagtaagggctggttggtaatattaaaaataaaaataatgataacatttgaaaagattttttacaccacttaaaaataatattttctgtttaaaagcagtatacgtacatgtatctatgagctttatgaagtgtgtatattaccattatggcaaaaaataagcatgcattttttaattttagaagataatagtttttcttgactgatttaaatcatgattcaaatcaacttgatttaaatgtagtctagataatgctaaaactatattgcaggtgtttgtcaactagctagaaattattttaatggttaagggagtgcataatagaaataattattttgctgcagatatggcaagctctgtcacccgtggggtgcttgtacttggatattagacacatttgtaaaaataaataataaatattctggaaacgtgatgccaagagagcgtgatcctgtttaccacccctgctatccttcatttctttgtggcatcatttttttttgtgtgttaaagagtaaatgagctgacttggtaactgtgcaagaataaatggttaataacatttatttttatttacatttgggcattcttttgagaccattttcatagaggttgtttcatttaattcttgaagtacccctataaaatagctgaggaagcattttcatagagtccatttcatttgattcttgaagtacccctatgaaatagctgaagcaagcattcttaattcttatggatgttaacactagaagcagaagatcctgatctcattcttaggctgggatttctcctaggatgtcagcttttagaagaagaaaaatcactgttacctccaaataaaatcttactatgtagttggttctaaagaaccttaaatattcaattataaattcatccccaggtattttgaagtgtttcatttaatttgaaaactgtcatctggttttcagagactacagcagtatgtttttaatgtgttggtttagccatgtgacaaattaagcaagccctatgaacatgtgttactgagattggtattggcaaggacaataataactaacatttgttgagcacttatatgatagagatactacgacgggctttatgtaggatctcttgtttgatatgtctattacattaaatacaattaggtaatactataatctccactttataggtgaggaaattgaggcttagaaaggttaagtaaattttcaagattatactagtaagtaaatgatctgagattgaagcacagagaccacactcctatttattacactatattacccagttcaaaagcattagtgagacatgtgatgtgtgacattgacctgtcatcctctgtgagaagtagcttctgggactgatggtcttagttgtgcatccatgactagacttctggatgaaagaactccaagtttctaggagggcttgtttcatttctagtcctcaacagaatgtgtttgagaacttgattttttcatgtaattcattcacttatggggcaattaagataaaatatcctggttttcaaactgaaaatgttaccaaaaacacattgcaattacataggatggttgtttcttcttttgggaatagagacgtatcatagattgacaatgttgttttttttaaaaaagtttacttctttgtcagctccgtgaagggagggatcttgtctgtcttggttgtcattagcacccagcacaatggctggtataataaaaagatgttcaataaatatttaatgttttatgttatgactgcttaagttagaactggaatgtggctcctcatatctcttttggtttatgactcctaggtttttttaagagagttaggtagtagtaggtacatttattattatttttcattcagagatggatctatatgtttacttttaaaatctcctacacttctgtccactccctacttcctttttcacttccttcctgccctgttccaacatactgttaacttcccctccccctctccaccaacagatattaacgtccaagagtgaacctaaatgagctcttgaattcagtagagcaaggattggcaaattttttctgtaaatggctgatagtaaatactttaggctttgcaggccaagaggcaacatcacggatattatgtaggcacttggataacaagagagaaaacaaatttccacagaattttttaattgacaaaatttaaaatccaatgacaattattgagcacaatttttggtaatacagatctactgatgagaagtatgaaattctttttgtgggagagaataacattccacttaataagtgttcaaagttaatgtttgctgtcattacattgactgcaaaaattcatctgtagaaaacattcttagctttcaggccttaggaaaacagacagtgggccagatttggaccgtgggccatcatttggtgaccttttaactagactgtggactgagaaatccctaagcagggttacttgccctggatattccttctcataaaggctcattgctctaagactggaaagggaagatgttcaaatgggatttgtagggtggaaccaccttagggaactagtgaacataaagatagaagagtagtaagagagaagggaaggagagagagtttctctctgttcagggaccagtggtgattaaggggcatgtgccttggacgtcatgctgggaaggcccgaatcaggtggtgggtggggatagaggtttgaaaaagcttatttaggatccccattacttttgttatttagcttcctgaaatgaagggctcattatcttggccatcagtgacatacaaagattaagggacatggcatttgggatgggatctggtttctcaaagatcatgagtcatctaatggaaaaataggtgacttgcagcatggtgtggagtcattttttcacctaaattgaaacaaaaaggttccaggttggtgtaggggcaacactgtgaggctgccagtggctgtnnnnnnnnnnnnnnnnnnnnnnnnnnnnnnnnnnnnnnnnnnnnnnnnnnnnnnnnnnnnnnnnnnnnnnnnnnnnnnnnnnnnnnnnnnnnnnnnnnnnnnnnnnnnnnnnnnnnnnnnnnnnnnnnnnnnnnnnnnnnnnnnnnnnnnnnnnnnnnnnnnnnnnnnnnnnnnnnnnnnnnnnnnnnnnnnnnnnnnnnnnnnnnnnnnnnnnnnnnnnnnnnnnnnnnnnnnnnnnnnnnnnnnnnnnnnnnnnnnnnnnnnnnnnnnnnnnnnnnnnnnnnnnnnnnnnnnnnnnnnnnnnnnnnnnnnnnnnnnnnnnnnnnnnnnnnnnnnnnnnnnnnnnnnnnnnnnnnnnnnnnnnnnnnnnnnnnnnnnnnnnnnnnnnnnnnnnnnnnnnnnnnnnnccaggggtcacagagatgatctagaatgatctaattctgtccattcgcctgatagacgttgcccaacaggcgatcctctgcccatcctccccatcccaggccatgacactgtcaccaactgaaacagaccgctggggcacatcttgagtttgtcctcttctgccaccttcccgagtctgatctctcctccctatccccccaccccaccacgggtgccaggtcttcttggagtactgcaatggcttctttttttatgttttgtgatggagtctggctttgttgcccgggctggagtgcaatggtgcgatctcagctcactgcaacctctgcctcctgggttcaagtgattctcctgcctcagcctcccgagtacctgggattataggcacacacctacacccggctaattggtaatggtttcttgtcttccttcctccagtcttgccctgtctcatctgttttcccatggcttccagtgtgctttttaccacattaacaatcgaatccttccgtgcccctactttaaaatcctcagtgcccacttccaacttcataataaccccccagattcttagcctggcctgggctcttgtgaattctctgatattccagcctcagctctccctgtccctgccccacccccttggtgctcccacaatgccctgggcttaactgaccaccttcagctctgaccacatttggctctgcggccactgctcatctccccacctttggcacattgtggcacctggcaaaaacttgttggatgaaggaatgacttccccaacagtgaggcggcttaaacggcaacccatctaaaggggagggcctggggttaatacatgattcctgtcacacaaactaggtccttatgccaccttggactcacttgtggatttcaggacctctgcatgaggagttgaaataatagtcttcaagcatctaccctctcctctctgctttacttttactctaaagtggaatgccttagcatcttttcattaaaaagttagtttaaaaaatggtaaaatagtatatggtcatgtcaaaatttaagcagcatagaaggctataaaatgaaaagtgattccttcttcctctgtatgtttctatatgtataaaatttctgaaagaacacacaagaaactgttagaagagaggttctctctggagagtgatctgttgacttttattaataaaatctgctgtgttctcaaggtggggaaaccgaattctggacctgtgagcaagcagcttttttttgtgtaggcctctgtgagaagaaacttttaaaagtggtttatggtttagaacttggtagggggcatgatagacctcattgggacaggctgtggcctcttgtttttgctcctgaccctgagaagtaacttatctcttaagactaagtttcttcagtttacacaatcagatgagaaaacccacccttgcctttctctagagctgtagtaaaaatgaatgtttctttaaagagtccttgacaatagatatgtagctaagtattacatatggatggaaataccatatacatgcatgtatagagatggtgtatggggaagctttgtcatgttctctctaaccattccatctctgtgataaagtatggagagctttacccagttgcttaactgtgattcagaatgaaatcacattttcaaaactttgcttaatttattaaaattgatcagtgttttggatcaacatttgggaggtatggaaagaagaggcaggagacatacataagaagcttcttggacatatgttgaatatatgtgagcaatattcagattttgcagggaggaaagtgagtggtaccaagatagtgtcctgtacagggagtcaaaattgtcttcttctgtagccgacccacgatgctttgggtgcttctgtggccttccctttacatggatctcagctcaccgcatagctttatacaccacatagctcccatacagtgtgactcaggcacttccttgtcatttaatttgttatgaccagcatgttttgagtttgtaattcaaatgtgtaaaattttagttgaaaatactccttttaggtggttgcaagtgagattccctaaaagaaggtaagaaaaatgactgatgttaagctgagagaaatcggaatacggtggtttccaaaatgggcttttctttcctttcttcctgcctttctttcttcttaaaatcatgtctgcatccagaagcataaggatgagagacttctaacctttccctgatttcaacctaatttcaaggagaaataagggtcacacaaggacaatgtatttatcaatgaccaatatcaactaagatacatgcattattcatgtgttttgaaattgatttattggctaatgtaggcgcaaccatgtttagcaacatccagaatttaccactgaactttctttttaaaaactttcacttttaagggattgggaacaagatctaattgatagaaatggaatttgcatggaacttttcaggaattcagctttgtacaaagggccttgtgcaaaggattaatccaagaacacaggcttttttagtgcctttacgatggtctcctttctttgtggcttatttttgtgctttaagtgtctttggaaatgggatgagaggaaatcagagaactcttatgaacaagatatgaaaacactgatcatttactgccactatttaaagcacacacagctctctgagcagtgaaagatgtcagcggcacttttgaannnnnnnnnnnnnnnnnnnnnnnnnnnnnnnnnnnnnnnnnnnnnnnnnnnnnnnnnnnnnnnnnnnnnnnnnnnnnnnnnnnnnnnnnnnnnnntatggaactctacacagttcaaggcctttgagggaggaatttaatttggcttcataacaaagaaatttaagacattgagtagagtagtttaattatattccatctttacatactcagtaccttctgttttgctttgaaaactgtcatggctagagaatgaagttaaaaatagtcactgctgtttaaagcgtattttacacatgtagctgtgtacattctcttgctttgtgacctgcatatagggatccttctggcagtcagacacgaagagtcagtgaccccctttcctctccaccccaaagcagtaccatgcagaacccagattttttttttttttttttttttttttttgagacagagtctctctctgttgcccaggctggagggcaatggtgcagtctcggcccactgcaatctccgcctcctgggttcaagcaattctcctgcctcagcctcccgagtagctgggattacaggagccgctaccacgcccagctaatttttgtatttttagtagagactgggtttttccatgttggtcaggctggtcttgaactcctgaccacaggtgatctacccgccttggcctcccaaagtgctgggattacaggcgtgagccactgcaccgggccttggatttttggcattctggaattttggcatggtgggggttctggctggaggtggaagcatccgtcttggccccactggccttggggccagagccctggtccatccccaggccaagtcctaccagatcagctgctaagcctgaacagcacttgagggcagggttggtcttcatacctgataatgagaaagtggaaatggcaatataattcccagtctgtgcataacggtagttttagaattggatgatttaaaacaacaacaataaaacaaaagctgagctttggtttcagtaaggttttaaagtgaggtttctgaagggattgtattatttgcttgcaagcctgagattcactattctgaactatgggtaataaagggtgattcaggtatattgcttccaacatacagaaaagggccagaaattacccatggagaaagatttctttccatctcatcttctattttacatttagaagggtttgcgtttgatgttagaccaatgtggggtcaaattctggctcagccaccgaccctgagtgaccttttaagttacttaacttttcccacgtttccttttcctcatctgtaaaatacttcccttaacaattttgtaaagatcaaaagagagaatgcacagtataatccctcctacactatatgtggtaagacagttataattcctctatgttgtatgtgttaaaaagtagctgctgatgttactatttttatgagaaagcccatggactttaagatcagagagctttggtcttgaatttcagctccttagataaagtggcccatcctctgagatcttcagtttctgcttctataaaacaggaatgttgtgagaattaaaggaggcggaaaaagtctggtaccttagaccctttgtgagaatttgcccatgttgttttctcagcaagctgcaaagcgtaaattgctttgatcatggttctgaaaggaagagttgtctccatcacatttacgaaaaggcagaattagaagtgaccaaaattcagttgttacaggtttgtcctttagggatggaaattcagcctcaatgattagttctggagaaaagatcagtgcctaatttaaggaaatggtttttaaagcttcccctgctttgctaaagaagcagtgacgtcaggcagaaaaagggtggttaaaatgcaaagtaagagactgcagcagtggtcgcctctaaagagctgtgatttcccctacgtagtagtggagtctctttctaatgctttttaaatgaagaggtgactatgggcaatctcataaaacagcccaataccaggatatggagaaaacgtgaacattaagtaatcgtgccccagcattctcatagactataacaatattggctctgagcaaagtaaaacaccattccccctctggttgttggtgatcccgggattgaggggttaatagcaggatcggtgtggatatttttggcaatagacgtgagaaagctgtggcaagcttccctgtcagggtttagacctgatcccaggtaaaggagggaatctctctgccttctggaggcttgcttctcggcagtcctgggtttcgccttctccttctacctggcagcagagccacctgaatgtctctttgttgggtctgggtggagcaggagtgctcgagggagcactctccagccctaccctggccacctatcctcactggctgtcggtttcctggtactgaaagcatcactgaccaacacagtgaaatgccccagtgatgaaaagctgtccccaccaacactccagctttggatccttccttgcccatcagcactcaggaagcccttgaaagaaggtgaacggagaaaatattgccagggtttccctgcagattgcccgcccccaacccagccctctgattacacacactaagtgccgctctctgtgtaaataaccttttcttccctgcctcccttcagcctccctgctccccctcccatgctcttaggctctctcgcgtgataaatagccaggctactgctcagcatgcactaacacctgggaataatcatgcaaaaataacagtgagagactgccgcgcgtctgttcttgacattaactttcctcggtttgacaggctgccaccaccagctgttagacttatgggtcttttttttccagtggagatggctgctttcctgctttcctctttttttgggttctaataggttacatcagtgtcctatcaagatgacagaaaagagctttgacaaagaaaccattgctaaaacaggccagttctctattctgatattttattccagttgttagtattattagactaataatcccccactgatttttaaatgaggaatatctgattagaactatattagtgtttctcccctcagaaagggatttgttgttgcctcttgtgaattgcctttgaatgtagcaaatactagcatttggtcccatagggccaaaccacctatcgatttcaggtctcagatatatttgtaataatgatactaatattgacaatagcaatagcccctgtttattgagtgctaccttctaccaggccctgagctaaagttatttgtatgatcttctgtagtagtcacatgagccagatgttatttccgttttacagatgaaggcactgattccccagagcgatcaaactacttgcttaaggttttgtagctaacagtagagctggattccaacccccagtgaagacagatccctgccccaccctgtcttccattaacacgctactttttgctctcaggccaccatgaaagttcctttggttgtagttctacaattatccttgtaattttgctatatttgtatgattatctgaccagtgtcacagtcttgcccactacacagtcagtccagaagggcagggacctggtctgtttgggccactcttgttctagcaggttgcacggtgcctggcaaatggcaggtgtgtagtaattattgggtggatgtgtgataagagttgaggtgagctgactgttagggcagcagtgcatgagaaaaagctgcaactagagattaggaggaggagattctgtagtagtacgggactcatcagggccttcatggtgatcccatcattgccataaaattgtaaaatggaggtgggttaagccagttgactgctgccagatgtcagtgtatgaaagaagcagtatttccccaggctgagcttctcaaggttaagccccctttcttgtatttttaacatactttaattgcacttaaccatgcatttggaggggattatagatttatgttaaatatagtaggatataaaaaggagctttggaaggttgggtgcagggttagggaactataatatcagaccagggacttttaagccagtgtttactgacctaagcactatgctgagcattcactttgcacggattatctcactgagtcttcactgcaacgcttgtgggggtaattgttattattactcccatttcttagaactagacactgagtcttagagaagagaagcgcggtaacttgctcagggttccacacagcaagtactgacagggtcagcatttgaacccaattctgtctgctaacagaaccagaggttcaagtcctggtatgctgcctcctcactggagggagtccttgtggaaactgttgccaccctctgccttaatgaccttcattggctgaagaaattatggttcagtgtatggatcactgacctgagaaaccagggtgcagtggagttgatcttttgtataaggcaaaaataactactgaaaatgctttaaaatcctgctttacatatgatacatgtgacttcacgtttgacactgagatacacaagagaactgaaaccttttggggggaaattcttacctagcagaaagaattggccacactctttgaattacttcccttccacccttcttctgtttcccagtgtatgttgaactcctgtcaattttctgcttgtgggatgccatcgttttatgtgtacctaggctgccactagagacagcttattacacttgtacaaatatgggccacagttttctctcgactgagtaggttgggctaggcgacattctgtgattgtttcaggcagagggtggaagcacaaactccagcattctctggttgggcaagtcacgtggcaaggctgcagtgaagctcagttctgtcagttgatgccatgaggaatgtgggcccaggagagcacataatccaataattattttacgaaataggagaaatttaaattctttcctaatttattaaagtgttgctaaaaaaaactggaatgttttaaaaagtaacatacctgccaaataaaaacacctctgggagtggctgtaatccccacctgcaaatcctgttcttgctggcgacctctaaggaagaggggcctatggtagaccacacggggagactttgtgctccacctcctccccaatcccgacatctcacagtgaatggggagaaactgcgattctcctctcatttggttctcctctcactggtagtgctggtctggtacctatgggagtggcagttctgagccaccatgagaagccgatactacagtgaagaaacgaagaaattcacttgtgcaagtcaaagatgtgaacctcaaaacaatagtaactgtcaggtttaagccttaaaagccttaaatagtctaaagactattatcacatcggagtgctatttatgattaagtgtatatttatagtcaaactctctgaaccttagctttctcattttaaaacatgttgaactggactcaaaagttcttgctataaatatcagttcaactttcatgttacatttgaattgtgttaatggtaacaaacacaattaacttacaagtaggcccagagtactctggcttctcccctcaaggcatccagattccatagtaaatttgaacttggaaattacataaatatgagagagagagagaggggtgtgtgtgtgtttctgcatgcaaatatatctatagatggagttatgttgaaataaggatttagtctagaagctgttgtgataggatatgtcatcaatattaggcggctgaaaagtgcatttgttgttgctgttgttgttgtttttaagggacaggggcttgctttgttgcccaggctgtagcgccatggcatgatcatagctcactgctgccttgaattcttgggctcagttgttcctcccacctcagcctctcgagtatctgggactactcgcatgccaccatgcctggctaatttttaaatacttttttatagggatgggggtcttgctgtgttgctcaggctggtctccaactcccagcctgaagtgatactccttcttggagctcccacaatgttgggattacaagtgtgagccactacacctggccaggaatgtgttttctagttgaggaaaatgggcctcagagaggttgaatgactctccagggtcataagctagttaatatcagagttggcgccaatcctagtgttagtatgtcttgccaccataactgtcattgccccattgtgttctcacctccaaatcagagaactgatacgctataagactcatctctaattttatttcattttcctatgcatcctattcaagctacgtttgttctcttggtattaatgtaggctgttgatcaggtgatgtgaagaatattttcagaataatgttctattttttcttttcaatttatacatgtgacatcgaattgcagtcagtttacaactaactatacaaattaagaagctggaaagcatgcaaaaaaaaaaccactggtttataattttctttggtctttacttttaattctggaaagtgattctaatctcagacagtcttttagttgtaataaagactactaggtagcattgttttttttccccccttaaatttcctctctcagaacccctttgttcatttgtcagctcagttttaaaataagaactatcagtgtgaactttgatccacattaagctacatttacacaaaagcataaatcacagtatctggggtttggggctgttaaatgcttttctttcctgggctctgtgatcaagaatgcagaacaataaaaagcgtggagcaaaagaagttttatggcagctttgagagcaggaaattaagtttttttaacatgcagatgggtgaaaggctgttctgttgcatcttggatcactcaggcaagtgaacgtcagtttatcattttagtgaaatgcaaactgtagaaatagttcctacagtcatatgaacaaggagcccacacagatgactgcttcagctgtttaactaggagcacacttcctcatatgactcttgaaatacactctttttgttttgtttcttttcaaaaaaaaaaaaccaaaacccaacaaagactatatactattacgcctgcagccaagtggctacaaaagataacttacagtggataactgggaatctatgaacagcagaataagataatattttaccagaatgatcttcgatgcgccctttttacatataggatttgttagcccaactgataatacatgcaaggtgtcatcccttaaatgtaggccgtttctatgtgcaacacaaagacataggtaatctggagtcttggtacaaatgggctttgtgtgtggcattttcacaaccaataatcagggtcaaagctatctgtagcagtcctagcagttgttacaatgggccaaatgaatgtactgtttagtacatggcatagcctttggtttcattatggccagacttttaaactttttgtgatgaagaactcttttgctgctctcctggggatagcggtgcaaaggggatgccattgcaccacaagatcttgtagttggctgcgatttacatttcctgtatttagagaggtggtgactgagccttaatcaaactcattagggatctttaccagtttaaccacggaagaatttgtgcattggaaaaactcaagttatgttgatgttgggcacatgcatttatctccccccttatatgaattctgctaaactttgcaatagaatgcttaattaggagttgatgcttaatacatgctaacaatatccagtttttgtgtttcggtgtagattgtaaagtttatgtatttatatattcagcaaagctaatatattttagtagtgatttaattcattatggtttataaagttctttgaaaacaattttatttcatctcttatacttaaatttttagtgtttactggagtttctcctttagaaactgttataatttttaaagtgagatttcattacatgtgagaagtagccttaattttgcaaaacatgtttcattcacgtctgctgaggctaacggttgtccaatgatgaatttagaaggagaaggacactgaaaacctgcttatgattcagggagctagcgctctcatgtttagcttatttggcatgaaaaaacaaaatgctcatttctattctcctttatattttggcaccattaaaacactcaaagcatattataattgcaaatggaatttggaatggtgatatattctagaagtgatataagcaaattgcattaaaaggaattcacggaatgcagcactactgcagtaagcctgtctgtctttcaggttgaccccctgtttacagtgccagcgccaccaccgccgatttccagcagtctcacgcctcagattctaccctcctacttttccccatcttcatccaatattgcagcaccggttgaacagcttttggttcggactcgttctgtgggtgtcaatacatgtgaagttggagtagtgacagagccagagtgtcttgggccctgtgaacctgggaccagtgtgaatttggaagggatcgtgtggcatgaaacagaagaaggtaaatacaatttatttttatatatttcccgatgccctcttccccatgatgtatttatgtccacctgtgaggagaatttgttttgcggtattcagagaggaatggaaagtgttttttatttccgctctctggatttgtgttggaagtaagaaccgtgtttgtcttcttgtgcatggctgcttttaaattgcagatgagttgggtgtttctaaaagtgattctcctctttaagtgctaacatggaaggactgtgagaagcaggtgagggtttactcttcccctaaaaggtattgtggaaattaggaagggagatagatctcaagtttatttaattcttagggtgccaaccaatgtgtctgtcttgacatggttgtttttgtgttgtagaggcttatatttactttctgaattgagccaaggttcttgcacatagtgaggatcattgtcatgatgtggctgtggccagctggtgctcagaagtaatgaggccagggccaaagacttaagccctagtaagccggtcacttctcttctatggccagagacgtaaaaccttttctgttccttaactcggcaagccatttggcaaatgcaatccattagccacaagagaaacaaggttcaaaggaaatggatcaggattaatctatcattgctattggaatataaatcagagcatatgccatgctgatagtggatccaaatcatggttgaccatgtctcatagcacatgaccaccaggtatgaagtgtttcatatggccagtgtcactaacaagccaaccaataattgaaaactaactaccaagaagatctgtagtgctccattggggagtgagtagagtagaagagataaggaagaagcatgctccagggtgcttcagagtggaccagagaacaaagaaaaatgaaggggtgggggaacttttttttctctgtaagttagatcggtcaaagataagggagatgacagttgttgatatcatggtcatttgccagaggagtaagggcaggatgagggtaacaaaagggtctgagactcacaattattcatcagattcctctgaatcaagggagaaaaactgagggccgaaactcaaagggagaaggtgaaatgtattcaaaagtggctgagtggatggggaatattgagggtaattgctgggcaagaagtagttgagaaaaaatagttaaggatagtgacaaactgggaaatgaaagaagaagataaaaataaatgaaaatcagatgacaagtgttgagcataattcttaaaagatagaaaacagctcaagctgtttcaaggtagaaaacaaaggttgttagagaactctgaattctacatattacattaaatatactcttgtgcgatatgtttcgtagttaaataaaaatatttgtagatagcactggtaagtataaataaagacaatacacaagaaagaatcagagaaaaggactgaaagtagctatggtcagcttttgtttgctcagagggaagtgattaaaatttacttttttggctttagaaatttttgagttttgggtctcttctttcattttgtacttttaatttgggtttttcagatattctgggaagccatttgaaactatactgtggaaccacattgggaggaactgatgtaggaggagccagaatttgtctcatcttgcttgtctgttcagccaccctccagtacaaggggtcccatgtggggagcaagcttctatcatgttattctcttgggttgtgcagtttgccttcccttagattttctctaagggaaatggtggataaggcgttcagactgacactcagtgtgaaaagtataaaaaagtattgaagatcttaataaggtcacagtgaatttgtttaggtgcacattttcaggaacagaaaaatatttggaaagtgtaagggtaatttccctaaacttgaacatcagatttttttgtacttggataatttactcattagcgtgaaatgctgtcttcccatttcttagctatgacttagcactcccatcagtttattgcttgtcatgattttatttattcaagtgtggagtaggactaagtccctgcagtgtgacctcactgggtggtagatgttataaaattagccacaaactttctggaacagctgtaaagcttgggttatttttcactttgcttagaagtctgcttagttttgacttttaaccttagcctcttctcaaagataagattatttaggaaaaaaatctgggtttaaaaactatagcagtacataagttggtgtggaattctgggcatatgcttaaagagctgtaaggtattattactgttgttattatttgatagtgatatacataaagcctcaccagttccactctgtcctctgaaaaactggtctcctgagtccaactgcctttatacgtgctctgttccatccatttctgtggatatctttgtacattcgtacagcggactgatagctttagaaggttttcaggctgttggcagccccagccttctctttactgcctcacattttccaggatttggaatgtgtggatgtttactgtggtgacaagaaggagctggagctgttaatagagttattcttgctgaataaactaaacttctgacctccaaagaatttaagaactcatcttagtaaaggcctgggtcataagatgtatgtttaatgtgcaaccatttgcaagagcgttccatttgcatttttctcactatagtgtgtttaaagctcttgtaccaatttaaaaattaaacccacttgaccattaattttttccttttgggagaaacaaagagagacacagaacaaacacattgggagccagttatttggcagagctgaaagagagggattccaggagaaggggaggggagagtaagctacaatagttttgtagtgtgaggtttcactaacaaagagcttcaagttgagcatttataaaactgtcaggtgcctttgactaatgtcctgtagatggagttgaataaaaccccgtccctggtattttcacttggagagagagtattgtgtaactggtagtgttttccacaaacctaatttgttacgtgcgttcatatgtctgtgaaggtcatatatgtgtgtgtgttttaagatcctagaattttaagagttcatgcctgcactctttggggggaatattgaatattactgtgatttatttggatggttgggaatcgcaagactggactaggaggatccccattcaatacttaattgtttcttgtgtttggagtttctcattagaggaggattcttttagtcagtctttcccctagtgttactgccagtacatgaagtactggttgtctaagaaccaagttgtgctcaggaataaagtgttactagtgaagttccctctggaaaaaattagtgggtttcagatcatgcctaataggagagaaaaactattactgcatttggatgtttggtaattctactctgatcttttttctttaaggtaaatgcataggaccaatgatgtatggtacaaaattactcacagatgttggaaagaatttccttagcatttattcctgccatttgggacacatatgcctctgtatagtcatttgtttgaaaatttgctctttaaaaaaaaaataacaaaacaaaccagaaaaaacatggtgtatatagcaatatgtgtaaatacatatgtgctgaacttggctttttagcctttatgaatgtgtttccttttgatttttattgaatcatgtttcttattggctttttttttttttttggccttacctgagaacatacttggtttagctgcatctgtcgccgttattccgaccgttatttactactgctctgccactctatcattcacgacgcttttactttcttactggttaagtaaagccatgaagaaaagaaagtgagagaaagaaaagtggtacttgccaaagagggttctcggtgctgtgcctttgaatcaccttgggagcttttaaaacccactaatgcccaggcaccaccccaggcatttgtttagtctgggttggcattttggtctggtttggtattggtgttttgtcaaagctccctaggtgattctaatgtgcaaacaaggttgagaaccactgtctcatggcaaagagttgatgtcttagccctttgcaagttccttgactttttctctgtaaggaagacacatgtattattgcttcactttcccaggtataaaatggacatagggacacccgtcctacttacctcacagagcagatagtgtctatcaagatgctatggcaggtgagcagggttgtttaatcactgtgctgatgaggaagagggtctggctttgctcctcaacatgaactccacagaggatttaagaggcttaacaaacaactggtagtaccactcttcctaatttattgatatgggaagagtggaccctactgttgatttctcaagtgagtccaatgcaatacttctatttctgtgtggcctctgctgaattattttttagatgactcagaaccccatagtattaaggaaagttgttaatgtagcaaatatagaatgtgctgagagaatcagagtttttggcgggcaatgaaaatacaaagggcaacttatgatagtgactaccattttaatgagaagactcagcacctggtgtgagaggatgaatgcttgtttgtatgaggaccttcttcacctgatgcatttttcaaggaaggaaactgattttgggaatccgtgttttcagggtagttaattggagaaagaaatgattctctctctctctttttttccttttttttttttcttgagacggagtttcactcttgttgcccaggctggagtgcagtggcatgatctttgcccactgcaacctccacctcccgggttcaagcaattctcctgcctcagcctcctgagtagctgggattacaggcatgcgccaccacacctcgataatttttgtatttttagtagagacggggtttctccatgttggtcaggctggtctcgaactcctgacctcaggtgatccacccgccttggcctaccaaagtgctgggattacaggcgtgagccaccccgcccggccgaaatgattctcttttaaatcaccagagatgttctaaaattcttctgcttctcctatatctccaaagtcataaagatgatagtatttaaatgtgcaatgtaggaggaggttcaagctaattctttttttttttgagacagggtctcagttcatcgctcaggctggagtgcagttgttgtgatcatggctcactatagccttgatctcctgggctcaggtggtcctcccacctcagcctcccaaatagctgggaccacaggtgcataccaccacaccagctcattttttttgtattttttgtagacacgaggttttgccatgttgcccatgctagtctcgaacccctgggctcaagcaatccacctgccttggcctcccaaagtgctgggattatagtgaggtatctcactcagcctcaagctaattatttaaaaggcaaatgatcctatgtaatggaaaatgaatctgtggtattgttattctcattctgcagtattacttgccaatcttactactgaaaatagaacttttcttttgaaattctgattaatttgaggtgagattaaacattaatccaggcttgctttgtattttcagtaacagcatggagttggtacagtactttacagagtgaaatattatttattgaggtatatcatagtgactttatcaattcaactttgactctcaagaggaataagatgtctgtatttcgttacccctatccaagtcagtggcgattataacagtgcagtaatggggaacttgagatgtctagtgggcatgcttcttatgactcctgcgctaaatggagataaatcagcccccaatgtgtgagttgggcaggtgagcatggttgtttaattaccatgctaatgagaaaaagggtcaagtggtgagcctcaacatgaactctacagaagttctgaggggctggaagaactactagttagtgccactctgtattggctgtgaactttcccctcggcttcctgggccatcttgccatggaagttgtcagtgaaagtgtggatggttcccgtcattctgagcaaactgtcgcaaggacagaaaaccaaacaccgcatgttctcactcataggtgggaattgaacaatgaggacacttggacacaggatggggaacatcacacacccaggcctgtcatggnnnnnnnnnnnnnnnnnnnnnnnnnnnnnnnnnnnnnnnnnnnnnnnnnnnnnnnnnnnnnnnnnnnnnnnnnnnnnnnnnnnnnnnnnnnnnnnnnnnnnnnnnnnnnnnnnnnnnnnnnnnnnnnnnnnnnnnnnnnnnnnnnnnnnnnnnnnnnnnnnnnnnnnnnnnnnnnnnnnnnnnnnnnnnnnnnnnnnnnnnnnnnnnnnnnnnnnnnnnnnnnnnnnnnnnnnnnnnnnnnnnnnnnnnnnnnnnnnnnnnnnnnnnnnnnnnnnnnnnnnnnnnnnnnnnnnnnnnnnnnnnnnnnnnnnnnnnnnnnnnnnnnnnnnnnnnnnnnnnnnnnnnnnnnnnnnnnnnnnnnnnnnnnnnnnnnnnnnnnnnnnnnnnnnnnnnnnnnnnnnnnnnnnnnnnnnnnnnnnnnnnnnnnnnnnnnnnnnnnnnnnnnnnnnnnnnnnnnnnnnnnnnnnnnnnnnnnnnnnnnnnnnnnnnnnnnnnnnnnnnnnnnnnnnnnnnnnnnnnnnnnnnnnnnnnnnnnnnnnnnnnnnnnnnnnnnnnnnnnnnnnnnnnnnnnnnnnnnnnnnnnnnnnnnnnnnnnnnnnnnnnnnnnnnnnnnnnnnnnnnnnnnnnnnnnnnnnnnnnnnnnnnnnnnnnnnnnnnnnnnnnnnnnnnnnnnnnnnnnnnnnnnnnnnnnnnnnnnnnnnnnnnnnnnnnnnnnnnnnnnnnnnnnnnnnnnnnnnnnnnnnnnnnnnnnnnnnnnnnnnnnnnnnnnnnnnnnnnnnnnnnnnnnnnnnnnnnnnnnnnnnnnnnnnnnnnnnnnnnnnnnnnnnnnnnnnnnnnnnnnnnnnnnnnnnnnnnnnnnnnnnnnnnnnnnnnnnnnnnnnnnnnnnnnnnnnnnnnnnnnnnnnnnnnnnnnnnnnnnnnnnnnnnnnnnnnnnnnnnnnnnnnnnnnnnnnnnnnnnnnnnnnnnnnnnnnnnnnnnnnnnnnnnnnnnnnnnnnnnnnnnnnnnnnnnnnnnnnnnnnnnnnnnnnnnnnnnnnnnnnnnnnnnnnnnnnnnnnnnnnnnnnnnnnnnnnnnnnnnnnnnnnnnnnnnnnnnnnnnnnnnnnnnnnnnnnnnnnnnnnnnnnnnnnnnnnnnnnnnnnnnnnnnnnnnnnnnnnnnnnnnnnnnnnnnnnnnnnnnnnnnnnnnnnnnnnnnnnnnnnnnnnnnnnnnnnnnnnnnnnnnnnnnnnnnnnnnnnnnnnnnnnnnnnnnnnnnnnnnnnnnnnnnnnnnnnnnnnnnnnnnnnnnnnnnncgctatcttgtaatatttgtgtgtatatgtggtattgttctgctttttaatcttcttcctgtaaagaaggaattagtaagaaaatcttgagtgtcttaatattatagtgactgagctgaagatgtattttctaattacaaaatggagatggtctcattggctgcaaagaatagcttgtaatcataggtaggcatttgattaaagtattccactgacatttaaaaaataagttctcacagcagctttattgagatataattcacataacttaaaatctacgcacttaaggtgtataattcagtgtttttttctgtgtgtattcagaggtgtaccaccatcaccgcaattcatttcagaacattttttatcaccctagaggaaaccctgtaaccctcaacagtcattaccacttactccaatccccccattttgttgacttttacatcattgtccttgattctttgttgtttttatgtgtaaacatgtatgttttgtagacaatagaagggactagcttgttgagtacttactttgtgccaggcattgtgctaggcatgcttgtcaggtcatgatttcctttaatcctcagaaaaaaagccaaaataagcccactgtcattatctatattttaataaaggagacttagaaagggattcatctgtgccaggcagcacacctggcaagtgggggagagtctgaatttgaacacactgtggttggactttcagagcccttgctcttcatacaattcctgggtgttctggatttctgtctaccccttcacaaaagttcctgtctattttacaaagtgctctttggaaagggagtcaaatgtgatgtaataactggagtttatttttaaacatggaatgataggaatttctttataattctagcatctgattttggcagtagtatttgaatcagcttcagctgggttgatgtatacaaaccatcattttcagccccactatgctgtgagcttcttaagtgcacaaattccatctgttttgttcactgttggatccccagcgcctggcacagagtcagtgcgccatacatatttgttgaatgttgaataaattcgtggaacaaagtgatatggtcttgatacctgtttgagtagtgtagctttctagtcaggaatatgctacttttaaattaagtttggtctagacaattgaaaatagagaaatctactttgtcactgatttttaaaaatccattataaaatctcattacattttattatatttcagcttccaaccttgttattgtaagattaatctgcacaaggaaggaggaacaaaatatttgacatactttttccctcaaatcattcatatcctcaatacggtttttatttttcaattataaaaggaatacatgccattttaggagatttgggaagaaaagtaaaaatgtagatgggaaaaaactctataatctcacaatttaggtgaccacttcatatgttagttcattttcttgatttttttttttattcttaaccataggtaccgtgttgtactgcagatctctagaacttagttatcttgaacaactaaaactttatacctattgagcagcaatttcccctttttcccaccgacagttgctggtaaccaccattccactctgcttctgccttggccaactactttagatacatcatatatgtgtaataattatgtgactggctcatttcacttgatgtaatatccttaaggctcatgcatggtgtcacatatgataggatgtccttttgacatgctgaataatattccagtgtgtgtatattccgcattttctttattcacccattgatggacacttaggttgctttcatatgttggctattgtgaataatgctgtgatgaacatgggaatacagacatctcttcaagatcctgatttcagtttggataaataactcagaagtggaattgttatcttttgattttttaaataatgactatcctaacaggtatgagatggtgtctcatggttttgattgcatttcctttgtggatagtgatgctgagcactgagcatcttcacacatacttgttggccatttgtgtatctcctctggagaaaagtctattcaagggttcccccagccctcaccttttttttttgttttgtttttgttttttaaataaaagagacagggtcttgctatgtcacccagcctggagtgcagcctcaaactcctgggctcaagtgatccttctgcctcagtctcccaagtagctgggatgggcctacagatgtgtgccaccatacctggctgagacgggggtctcactatgttgtgcgggttggtgttgaactcctggcctcgagtgatcctaccatcttggcctcttgagttcctgggattatagcaaataacaaataacccaatgaaaaattgtgtaaaaaaagttgtgtaaaaaattttgcacactttttcattatttgtgtgtgtgtgtgtgtgtgtgtgtgtgtgtgtgtgtttttctgttgctttgaaggagtccctgttttggatattaaccttttgtcagaaacagagtttataaatattttttcattctttttccttttactctgttcattgtttcctttactctgtggaatctttttagttacatgttacttgttagttacttggcgatttttgcttttgttgcctttgtcttagtgtctttagttcagatcattcagtggataaggtttttttttttgtgtttttgtagagatggggtctcaccatgttgcccaggctggtcttcaactcctgggttcaagcgatcttcctgccttggcctcccaaagtgctgcaattacaggcatgaaccactgtgtccgacctggatacacttttttaaaaggctgttttgtaagagcagttttaggttcacagaaaaatcgagaagaaggtacaaaaatttcccatatatcccttgcccctacacatgcatagcctctccattatcaacattccccaccagagtggtacatgtgttacaattggtgaatctaattgacacaccatcacccaaagctcctagtttatattagggtttgcccatggtgtgatacaatcagtgagtttagataaatgtataataagctgtattcactatgtagtttcatacagagtatttgcactgccctaaaaatcttctgtgctccacttactcatctctccttcccccatccctagcaactactgatctttttattgtctccattgttttgctctttctaaagatgacatattgttggaatcatactgtctgtagcctttttcagattggcttcttttacttagcaatatgcatttaagtttcttccatgtcttcttgtggctcaataactcaatgcttgggagtactgaatattatttcattgagtctggatgtatcatggtttatttgtccattcactcctgaaagacatcttggtaacttccaaggttggcaattattaataaagctgctataaacatccatttgtaggtttttgtgtggacataaagtttttaactgctttgggtaaataccagggagtgcaattgcaggatcatctggtaagagtatgtttagttttgtaagaacctgccagactgttttttggaaaagtggcaatactgtttggcattcccaccagaaatgaacgagagttcatttggtgttgtcagtgttgtggattttgaccattctaataggtgtgtagtggtatctcattgttttaatgtgaactttcttgacaatttatgatgtggagcctctttgctggtacttaccagccatctgtatatcttttttgatgagctgactgttaaggtttttggcccatttttcttacagagttgttttcttattattgaatttgaaaaggtctttgaatattttggaaactagttcttcagttctttctctctctctctctcttttttttttttttgagggacagggtcttactctggtcttaaactctgtcacctatgctggattgcagtggtgtgatcatagcacattgcaggtttgaactttttgactgaagctatactcccttctcagcctcctgagtagctgggactacaggtggtgtgtaccaccacacctggctaattaaaaaaaatttattttagagacagggtcttgctcagttgcccaaactggagtgcagtagtacaatcatatcaagcacatcacaagcgtatcactgtaaccttgaactcttgggctcaagtgatcctcccatcttggcctctcaaagcactggattttgggcatgacccagtatgcctggtctttagcttttctcatatacatcttatacgtatttcttttacatttatactacctaagtatttcacctttttcattgctaatgtaaatattattgtgtttttaatttcaaattctacttattattggtgtataggaaattgattgactttttgtatattaaccttatatcctgcatccttgctataatttcttagtagttctaggtagatacacttttaaatattgccttcttttaatcttaacattaaaacacaagcatttctgatgttatgaaaacactttctaggaagcattttttaaaatatcaaatattccatggaatggacacaccaaagattaatttaatttaaattccattaacaatggatatttacattgctttcaacttcttagataaatataaataggattacatagtatatctttgtgtatgaagtttttttgttttgttttatgaatttggaatttgtatgctgggatcaattttcaggaaactgaattgctgagttgaagtatacaaacatttctaatgtagtagaaacacatattgcctaactgcttcccctaagagttgtaccagtttatatttcctggatgagagtgcccatctcagttattctttccaactttggacttgctgacattttgatgacaaagggatgaagttgtaagtcaaatgtatagctctcaatgttcatatccagggtcctaccctaggtagaaagggaacgagactttctccttatagtaaaaatcaaaattgttcagcaggaggaagcaagcgggcaagtgatgctcccaagagaccacacggctgggctctgcctcaatggagggctttgctctggatgacagaaaggttgggatttaacttctgcttgtgtctagaatgactcttacagctctttttctcccaagtgaaggaagttaaaagatacttttaaatatgaagaattcaaacactcaagggagaaaattagtctgtcaaacatccattctgaactggaaggaatctgatttacttttgttgctgtctctgcaaacatttttctttgggattctgctttttcagaataaagaaggatgaaggacaggattttctagaaagcattttgcgtctcatgatttgtttataatatataatgtgtcacttgatgcatgcagtgtgcagttttccctggcatgcccaagtgctgtcctgccccctgctacttttatttcctcttgtagtctcttttcccttgtcttcttctgtatataactacagcaggaggaagaaccatcaaggtagtttttaaaagtagtatctacgaaagcattcctatatgcccttctggggcctttctgatctcaaataagtttggctggtattttcctggcaaaagaaaaatgaactataatatgacagaagtcatatcatggattttcaaaagctgtcctcaacaaagaaagtaaggggaattcggctcgtgggcacaattgcagggtatctagcgaagtctgacataacccagtcaggagacctaagaaggttaaaaaagtgctgtgaggcaggcaaggtgcttactgctcatttgataatttcttggaattgaatagtaaattgagcatttattatatacatacacattatacccatagatattcattcatatttaagtcttcaatatatatatttgagactctttcacagtatttgagtccttgggtgtcagaaatgtggctgtttcctttatgtgacacaagacacatttggtgcatctgaacaattaaacacttttgcctggagaaccttctgttgctctgtcaacaccatctagttagcattttctcatttacggagatgagtcccataattaggcccattattcttatggaaaaactgagatacagaccatccaaagaaaatgactgtgggaagtatgttctttctggatttctagttttatctaatattattagtctttcctagttttaagtctgtttacgtgtgtatgaatataactagctatttaaaaaatatgctgtgagggaaataaatacacatttgcttgtccgtttgaggttttgactgaaatgtggaaacttaattcagcttattaagtgaaatgtttttaaaatttgatattcaccaaatatttttacaaaaacaccccaagtgtagtttccaactatatatttcataacaaggaaaaaaaattgcccaccacttcctgtgcctcagagagtcaatgccttgtattctcctggcccagtgggcagttttgatcctgccagctcttcgaggacttacttgtacctttgcacagtttgtatactgtcttgtggatgtcttcctcatatccatgttgacagacaacttttgaagtaactcaagttgacagagctgactgagaacatttaatgtgtcttatttcacttgagcagcagcagaggccaacttgtttaaagagaacctgcaaaagctgctttccactgttttcctcagcttcatgagaagacctagtcacttttcagaatacaaaaagccagccagttccagacagtgcacacagtgcacatataaaattatttattgtccagacaaacatgtgtggctgggtaccagaaacacagaagagccacaactgggactggggcattggcttggctccctcttgaagctggctgcagtaagcaagtgtgtgagagtcactttcagttcaaaaagtctgaatactcaagggcagacacattaggaggccatagaccaggaaccaggacaatcttcatggcaaagcagtagcaccatgttgaacttgtctcttcgtagactcctgcctgatagggtgaccgaagggcattatcccattcacagggacagagaatctaatgggattaaggaaatggagggtcagctttaaagaagcagaatagagtgagctacttaaaattatattggttgcacattaatcttccacgattcagaaggagagcattaccttaaatttcccagttactagagaatccctgaagtatacaccctctaggaaatctccctttatatnnnnnnnnnnnnnnnnnnnnnnnnnnnnnnnnnnnnnnnnnnnnnnnnnnnnnnnnnnnnnnnnnnnnnnnnnnnnnnnnnnnnnnnnnnnnnnnnnnnnnnnnnnnnnnnnnnnnnnnnnnnnnnnnnnnnnnnnnnnnnnnnnnnnnnnnnnnnnnnnnnnnnnnnnnnnnnnnnnnnnnnnnnnnnnnnnnnnnnnnnnnnnnnnnnnnnnnnnnnnnnnnnnnnnnnnnnnnnnnnnnnnnnnnnnnnnnnnnnnnnnnnnnnnnnnnnnnnnnnnnnnnnnnnnnnnnnnnnnnnnnnnnnnnnnnnnnnnnnnnnnnnnnnnnnnnnnnnnnnnnnnnnnnnnnnnnnnnnnnnnnnnnnnnnnnnnnnnnnnnnnnnnnnnnnnnnnnnnnnnnnnnnnnnnnnnnnnnnnnnnnnnnnnnnnnnnnnnnnnnnnnnnnnnnnnnnnnnnnnnnnnnnnnnnnnnnnnnnnnnnnnnnnnnnnnnnnnnnnnnnnnnnnnnnnnnnnnnnnnnnnnnnnnnnnnnnnnnnnnnnnnnnnnnnnnnnnnnnnnnnnnnnnnnnnnnnnnnnnnnnnnnnnnnnnnnnnnnnnnnnnnnnnnnnnnnnnnnnnnnnnnnnnnnnnnnnnnnnnnnnnnnnnnnnnnnnnnnnnnnnnnnnnnnnnnnnnnnnnnnnnnnnnnnnnnnnnnnnnnnnnnnnnnnnnnnnnnnnnnnnnnnnnnnnnnnnnnnnnnnnnnnnnnnnnnnnnnnnnnnnnnnnnnnnnnnnnnnnnnnnnnnnnnnnnnnnnnnnnnnnnnnnnnnnnnnnnnnnnnnnnnnnnnnnnnnnnnnnnnnnnnnnnnnnnnnnnnnnnnnnnnnnnnnnnnnnnnnnnnnnnnnnnnnnnnnnnnnnnnnnnnnnnnnnnnnnnnnnnnnnnnnnnnnnnnnnnnnnnnnnnnnnnnnnnnnnnnnnnnnnnnnnnnnnnnnnnnnnnnnnnnnnnnnnnnnnnnnnnnnnnnnnnnnnnnnnnnnnnnnnnnnnnnnnnnnnnnnnnnnnnnnnnnnnnnnnnnnnnnnnnnnnnnnnnnnnnnnnnnnnnnnnnnnnnnnnnnnnnnnnnnnnnnnnnnnnnnnnnnnnnnnnnnnnnnnnnnnnnnnnnnnnnnnnnnnnnnnnnnnnnnnnnnnnnnnnnnnnnnnnnnnnnnnnnnnnnnnnnnnnnnnnnnnnnnnnnnnnnnnnnnnnnnnnnnnnnnnnnnnnnnnnnnnnnnnnnnnnnnnnnnnnnnnnnnnnnnnnnnnnnnnnnnnnnnnnnnnnnnnnnnnnnnnnnnnnnnnnnnnnnnnnnnnnnnnnnnnnnnnnnnnnnnnnnnnnnnnnnnnnnnnnnnnnnnnnnnnnnnnnnnnnnnnnnnnnnnnnnnnnnnnnnnnnnnnnnnnnnnnnnnnnnnnnnnnnnnnnnnnnnnnnnnnnnnnnnnnnnnnnnnnnnnnnnnnnnnnnnnnnnnnnnnnnnnnnnnnnnnnnnnnnnnnnnnnnnnnnnnnnnnnnnnnnnnnnnnnnnnnnnnnnnnnnnnnnnnnnnnnnnnnnnnnnnnnnnnnnnnnnnnnnnnnnnnnnnnnnnnnnnnnnnnnnnnnnnnnnnnnnnnnnnnnnnnnnnnnnnnnnnnnnnnnnnnnnnnnnnnnnnnnnnnnnnnnnnnnnnnnnnnnnnnnnnnnnnnnnnnnnnnnnnnnnnnnnnnnnnnnnnnnnnnnnnnnnnnnnnnnnnnnnnnnnnnnnnnnnnnnnnnnnnnnnnnnnnnnnnnnnnnnnnnnnnnnnnnnnnnnnnnnnnnnnnnnnnnnnnnnnnnnnnnnnnnnnnnnnnnnnnnnnnnnnnnnnnnnnnnnnnnnnnnnnnnnnnnnnnnnnnnnnnnnnnnnnnnnnnnnnnnnnnnnnnnnnnnnnnnnnnnnnnnnnnnnnnnnnnnnnnnnnnnnnnnnnnnnnnnnnnnnnnnnnnnnnnnnnnnnnnnnnnnnnnnnnnnnnnnnnnnnnnnnnnnnnnnnnnnnnnnnnnnnnnnnnnnnnnnnnnnnnnnnnnnnnnnnnnnnnnnnnnnnnnnnnnnnnnnnnnnnnnnnnnnnnnnnnnnnnnnnnnnnnnnnnnnnnnnnnnnnnnnnnnnnnnnnnnnnnnnnnnnnnnnnnnnnnnnnnnnnnnnnnnnnnnnnnnnnnnnnnnnnnnnnnnnnnnnnnnnnnnnnnnnnnnnnnnnnnnnnnnnnnnnnnnnnnnnnnnnnnnnnnnnnnnnnnnnnnnnnnnnnnnnnnnnnnnnnnnnnnnnnnnnnnnnnnnnnnnnnnnnnnnnnnnnnnnnnnnnnnnnnnnnnnnnnnnnnnnnnnnnnnnnnnnnnnnnnnnnnnnnnnnnnnnnnnnnnnnnnnnnnnnnnnnnnnnnnnnnnnnnnnnnnnnnnnnnnnnnnnnnnnnnnnnnnnnnnnnnnnnnnnnnnnnnnnnnnnnnnnnnnnnnnnnnnnnnnnnnnnnnnnnnnnnnnnnnnnnnnnnnnnnnnnnnnnnnnnnnnnnnnnnnnnnnnnnnnnnnnnnnnnnnnnnnnnnnnnnnnnnnnnnnnnnnnnnnnnnnnnnnnnnnnnnnnnnnnnnnnnnnnnnnnnnnnnnnnnnnttccaatataattatgagttatgagctcttcattgctatgtagcacattattctagatgatagtaccttaaaaacaacaatcatatcccacagtttccatgggtcaggaatctgggagcaacttagctggtgcctctggctcaggttgtctcagaaggtttcaatcaggctgtaggcaggtgctactgtcagctgaagaccccatccagtggagatgaaggagccacttctaagcttccttacatggtttttggcaggctttaattcctcacggggcaatttgacttgctatgccatgtgggcctctccataggaccgctcacaacatggcagcttgcttcccagcaagatcagagagagagggggagagagagagagagagagagacagagcacccaaaatggaattcatagtcttggaataacttaatgttagaaatgatagctcattacttctgttcgttataagtaagttcagcccacactcaggggagggcatcacacaagagtgtgaatgccaagaggcagtggtcattaggggccatcacaagtaattatgaggctgcccaccacaagtaattatggttaggccaatattcagtttttacattatgactacagcacagtcatgttctatgattaccttttctaatccaactcttttccacaagttaataacttatttttttgtttgcttagtgttctgtgcatccacactgattcaccatcaactgtcatgccagaattataaattgcttctgggtgtattgaaatacaccaagtataagttctatatgttttatcttttgggatagtttctcccagagttttctgaccttctccaatctggactgattgcttaggcattattcatagctataaaaatctgaaatatctcttgtataccattctgaagatgccattgcctcttatgttggatacactatttcctgactcatttctcttggtccatcccttcattttcgtggtgcacattttccaatagcttcctaaaaaaggattcatggtaggccggacacagtggctcacgcctgtaatcccagcactttgggaggccaaggcggaaggatcacctgaggtcaggagtttgagaccaggctggccaacatggcgaaaccctgtctctactaaaagtagaaaaattagccaggcatggtagcaggcgcttgtaagcccagctactggggaggctgcggtaggagaatcgcttgaacctgggaggcggaggttgcagtgagaggagattgcaccattgcactctagcctgggaaacaagagcgaaactccatctcaaaaaagaaaagaaaagaaaagcattcatgggaagtcaacattttgaaagctcagatgcttaaaaaatgtaacgcgtaaaaatgtcttctgtctaccctcatgcttgattgataatggggtcacatgaagacttggttgaaaatcatttttcttcagacttctggagattatgctcctttgctttgagctccccagtgttgtctccgaggagtccaatgtccttcctgatttcagatcttgtatttgatacctattgctccaccccagaaactttcatcttttctttgtttccagtattctgacatatgtcaatgccatcctttagcatgagtccttttttagagtcagggacttgttccttcacctaggctagagtgagtagcatggtcctagtacactacagccacaaattcccaggctcaagggatcgtcctgcctcaggctttcaaataggtgggacttaacagtcatgtgccaacatgctaggccaattttttttctttctattttttgtagagatgggatcttcctaggagtttaaaggtagtcttgaactcctggcctcaagtgatgctcccagctcagcctccggagttgctaggattctttttttcttttcttttctattttttgagatggagtctcgctctgtcacccaggctggagtgcagtggcacaatctcagctcactgaaaccttcgcctccttagttcaagtgattctcctgcctcagcctcttgagtagctgggattacaggctcccaccatcacgcccagctaacttttttttgtatttttattagagacggggtttcaccatgttgaccaggctggtctcaaactcctgacctcaagtgatgtgcccgccttggcctcccaaagtgttgggattacaggcgtgagccaccgcacctggcctgggattctttttttaatctgttgttctgagcttggtcctcttgttgaaaactcaagtcctgcagttttggaaattttatagatgtatttctttagaaaggattaatttccatttccatgctctctctttctggaactcattttatgtagaagttgaacctcctctaccaatcttcttttctgatctttctccttctttttcaaaactctggtttatatgcgttttgtattttctgcctggagagtttttcaaatttatctttgctttttcatttccctcatgtagtttttaatttctaagcgctttttattttctattttggttattggcattgctctcttaaaaagccttctattctagtttcatgaatgaagcatctcctcatttctctgaagatatttaattagcttttctaatttcttctttttattgtcagcattgcttttaattcgtctaagtttcttttttgtttatgtgtgtgatttgtcatgtgtattttttgttggagactttcctcaaatgcctatgactgttggctgtctgcttctatgagtggtgcgctgagaagctagtttgaaattctacatgcttcagtagaactggttgatggtataggcagacctggatcaattatttctgtagagttgcaattcccatattccttttctcttgcttttatcagttttccccgaaaaggcttcactgatcagctggcagccaactttcttggtgccaattttggaaaaaaagagagtgaaggattcactcttcattatataaactttataaactatgacttaaatcttcctttttttttttagtggccataatatccccattttacaaataagaaaatttttagagctttacatttctttgttgtaatttcttcatagctgttatttattccatgacctgaaatagagataatttcagtcaatatggaatgtgccatcataattatccttctacggagatctagtcatttaatttatcattattgtggtttgcttggcctatttttttttcaaatgtggcttcagcgatgcttggttttcagaagactataagcttgggacttaaaacagcagcatatgaatggccagagtccccctaacccagccctacctccctcccttataggtccttgccagatcattatgttgggcttgagctctgtttttatctttacttatcaacatgagctgttcgccaagctggtttttcacaaattctttcaatgttgaccagccctttaatatctgcacttctaagaatcaaagtcctaggaaaagacagatctcataagcactttccttctacaagggacagatgcatggaagacacctccttaaaaccaaggtacactgctatgttctgtggtaacaccaagccacggggcagggtgtattccccagagctccaaagcactctgctatcttaaccaaagcacattcagtcacctgtattttcaagtttttcttctcagcctagaaaggtgctttttcctttagtctacctacttcagaataataacaggtacttgcttgccttccttgagtggagactgtaaaaggtgattttaaatatcacattgatatcttactctgaggcagggatttttctctctcttgtccatgtatgtagccccggtgcccagcacattggctgttaccaataaatatgtgttgtctgaaggaaggaaggacagaaggaaggaaggaaggaaggaaggagggagggagggaggaaaagaaggaaggaagaaaggaaagaaggaaggagggagggaaggaaggaaggaagggaagggaaggaaggagaagtcaagtgaactcatgacttgacttcaacctgactgaaaacaatcttcccacttctgtccccgctccctcccatgttgctcaagtcctacacaggcacccagagggagcttgttgcatggagtccgtgctgttctgccagttgagtaaataggtgacaggcagtaaactgaaggaaacgtttttatatccttaaaagtgttatcttcgaggagcacagtttgtaatgctggagtgaaaagaagcctcctttcagatggccagcttgatgcaggcaaagctgctaatttgttttcaacttcaaggagatttagagccttggcttccctggcagtagctcacagtggaattgttttcttgctccttcatgtaagtctgctgcacggcaataagaaaggccggggtgtttactgaactggcaggaccaaattcttctttttgcagacagacctggagatttgttgcccaggacttttctgacttaatggtgtactcttgggaaaatacaccaatcttttttcatatctgagggcaaccacagaacagcccacaggaaggagcactagagtccagtcacttacctgttgggaaaggaagaatcagagggaaagcttttggctcatgggccctgggcagagctgtcatcagccctggcagaagtagacagcatacaaaggaaacacacatcaactaacacgcaccctcagaaaatgctagccagactcaaacctttggcaagtgacacccctggctttgcctgccagtctagatgtgagcatgggaacggaatggcagcccattgtggtgggaatggcagttccaagttgtccttttctggcctccggttaagtcccccgtctgtttagactacatttacaggaacctatcagtggcacttagaaggggaatgtagaaaaagaaactctgccaggtggttctatttgtgcattcttggtcagccatttcattattatgtggatttccatagttaattagattaattttagtctattacaatttgatgggatttttgtcccaaagtggaggcctttgggtactgagagttgaagttttaagatttcttggtaatgcctggatcaacattctaggaattgcttcattgccagctttccttttttggtggtggaaaaggcatgaataatgccttctttgaagctttaaggcacacaataagctaagaactctctaattgaactttacaagctgaaggggctgacttacgggcagcatttgaacaaacttctagtcaccataatttagtaagggttggctgccaaaagccatgtaaggctttatttgatccatttatgaattaagagcctgcagtaaattaattaccatatattggggctaataaaatctagcaggatgagaacgcctttgggttcatctgcagagaggaataaggactgagagctgcttcctggtgtctgagtgtttctggctcggggccttctgcagtgctgggcaagggtggtgttcgtgctctgtgtccaccaaagaggcatttgagctagcttttggctttgcaactgctggaaggctttgctctattgatcataataagctgttctgtcttattaaagttgcatcatggagtctggtttttaggagccctattgagaattagttgcagaagaagcgatttgcttgtattttccgacagttaacaggccaagcagatgggagagcagacctgaaatagttgggttggctgcctgccactgttctatgaattttgatttgcacggatatgtaatagttgtatttttcccttttttggaagtacttgcctgtgagccttgggaaaattaatccttggtttcctgtaaagtatacccttgtacgcgaatgttgctgcagtgttccttacagaccctgtgctgtgtcctatgtcaaacagatcaggacaccatagactgtgtgttcagttgaagaggagaagaggagagttctcgctccagtttcccatggctcctcagggaaaaactgttttcattcacaatttactttgtgttttaagatgttttccctttcaaagggggggattatttttcttttccttcaggctgtgttcaccaaaatattgaataaatgcaagaaaggatgttaaatttaagcttaagaaaaggaatttatagacaaatgtgaaacaaggatgaatgtatctgggtgaagatctgagttcttcctaaatcagttaaaatcttgtcttattaaacattaaatatatatgcaaaataatattttaaaacatatgcataagatataagaaacaacatgaaagcaaacgtatatttcctatcactagattaagtaatagaaaatttcactttcaggacttttttaacccctcagtgatccttccttaaccctattgtggttgttgccctccctacatagccgctatcctgaattttgtggtttttattcccatgttttatcatatacctctaaattcctaaataatgcattgcttagttttgcatggctttgcactttgcataaatggaatcacatatggtatatttttccaacttgcttttttcactcaacatgaagcatgagttcactgttaatgctgcatcatgttgtttgaatataccattattatttatccattcttgtgcccatggacttttgggttgtggccagttctttactatttcacacactttctcctggtatctaagccagttgttaaacaaaccaatctactttaaatagtgtgcggctatttttttttaaagatttgttttgctaacacggtacgtcacaaaatattttaggtattatagattataaaatgactttgttacacacttcaaagaaagttccatatttacacaatagtgtaaaggaacaggagctttgtttgtctgctcttaatagcggtctagataagtcattgcttctgcaaaatgcatttcattaatatttgttaaaactacagcttgaagagtcaaatggaattttaagatcagaaagataaacagaaggaaaagaaaacctccaagaagtgcctaccatttccatatgctgcattcacctctccttcttgggttcacagagcgtttattgtttgcactcgcccctcagatggctctaggcttctctggttacttctctccagtagcattcaccaaaggcctttgatgacatctctttgacttcatttaatgttgagaacacactaagttctcaataaatatgtaccatttttcaagtatgacttctgagacaggctttgttgaacaagtagaatgctacatctctacttctgcagcccatctccttgctgccagcaggcctttgtgtggccagctgtctcatgtcttttagctcttggcagagatactacctcccagaaaggcatttcttgactcccttttccaaaatagtctctctcctattacttcctaaacctttgccttattttcatcaagaatttagtacttaaaattatagctgcttgcttggttattatctctcttgccccatgtgggcatggagtctgtcttgtccgctactgtattccaagcacctagaagtgcctaacgccgtgagggggcagagcataaaaatggatggagaaagtgaatttcccttaaataacagatagattaagggtatttctaaaaaaatgatggccgtagtctcatggaatgaatcctgacagggacaagagtcatttaaacaagtcattaaactctttaggccttatttttctgtctataaaatgggattaaggatttagtaaacataaaatattaacggatacaatattgctataaaaaatggaaacattattatgagaatgtgttacagatacctaaactgccactggccatactagcctaaatgtttgtgaagggaatgtggattgaaagtgttttttgtaaattttcctgcaggaagaaagcagtcttcaaatagaaaaggatcagttaggttggaaggctccagaagactttatatttcaaatccatgatctccaagtcagcttgagtaatttttgtcaagaatttgcacacgtttgaatgatttgtcacttagctaacatgtactggaaacttactaataacatttttagttttcttcttagcacttaggtgttcagccttctgtaaatttcacccttgctgatactctttaatatcctcttgttttttcatcagggtgtatttttatctgactagctgagttgcagtctccttcaaaggagagactgttttgtttttaatttatttgtttttaattagttgttgtatttggcaaacatagtcatgtgctttgcagagaaagcgtgtttggataaaagcttattaagttgtttaaatacttttgattaaccttagaatcgattaggcccattcttctcaatctagactgcatattaaagtcattttagggctgggtgtggcggctcacccctgtaatcctagcatttggggaggtgaggcagaagatcacttaagtccaggagttcaagaccaaccttgtcaacaaagtaatatcctatctctacaataatagaataaaaaaattagccaggtgtggtggtgcatatatgtagtccaagctactcaggaggctgaggtaggaggattgcttgagcctaggagtttgaggctgccgtgagctatgattataccattgcactccacactgggtgatagagggagactctgtctcaaagcaaaacaaacacacaaaatcattttaggaacttagaaaaaaaatgcattggctcagtcctaatggtcaaatattctgaattaattgatttaatatgcagtctatgcatttttttaatgagttagtttgtaacttcctacaagttattctgatgagcagtgagaactgagaaccactaaactaggctggaacattagttcaccaatgtggctgcccactggaatcacctaggcaagttaaaacctactgatatttgggccccatttccacagaatttgatttaaatgggtatgagcatcaaagcttaaaagaccacccagttgattccaatgtgcagcggtttttgaaccactgcactcaattatgggctctttgaacatagtaccagacacagataggttagcccttgtctgactttacctgatgattcaatttacctataatgtgtagtgcttgctaaaatgcagattcctggataccacaccagaatctacaggagaatgtttagaggaatgccaagctccacgatgatttttatgataatgcaagtttggggaacatggcccagtaaatattccacttctagaattattatctttatgagtgaattttctcataatttacctggtttgcctctgagcagagaaacttgctttgcaagtacatactatcttttgaataattaaaaaaaaatttcatatttagtgaaaacgtatataagcagcaaaaggcatcaaattatgccatgtgaggaaacaattataattgctttctttctgtagttaaatgatcataaactacatgctgtatatatccttgaaataaacagccgatttagagataagcatttgataataggaatatgcatcaaaactgatgagaagtcttattatacctgaggtttcctctcccctactccattttctatttaggcttttttgaattttgagctgttgtctggtttgtgtttaactctattttgttttcatgatttttgttttaaggacatactcagatatagtattatattaaaaaagagaaatgaacaacaaaaaaaaagatgaaaagctgagctcattcaatagaatctatcgaattctattatgtgcctagcattgtgtaagaatgtttatacattttttttactaggaaataaattaaaagtttaagaccatctcttgtggttggaggataaatataaatgttttacagtgtccaaaaaatgtacaaactgcttaatccaccaactagttaaccaattgcataataattaagagtgggagagatatctacgtatctgtatttctatctataaccatcatattgtctggtgtttctaatcatttgtaagagatttccaatctcttgtaggagaaagttctcctggtgtgagttaagtacactgagtttaataataacaagcatttgcagctttgtgctgaatccatttgaaaggatgcacaaactatgctcatactgatggtggggatgcggggtgggtattgggacctgatagttaagttaggccccctcattggctattggaggctccagaaatgtattaattgcatgtacccagtctttcgggttatgttttttctgcagtttgagaatagccagtccactgcagttacccttttttcctgtttctttgagagtcaccttaacttagtaggaacttactgttgtcacctcatactcactacaagcctatgataaatgacttgggctcatacttttttccgatgaaataatttttaggagacatatttgttttctctggacttcctctgaacaaggttaagatctgagagttttgccttttagcatttgagaaggtaacatcaaaaggctgttccttcaaagaatgtcatgttgctatttaattggtaatcacttttcccctggtttagctctgggcttggtaaatttaataggctcagtatttttattttattggtactatgagatgagtgtctgaatcaaaacactaaattctgattaggaagacagttgaacaactatactgaagatctgttccagtgttacttgagaaacatcttaaactatgttacagtgaaaataagtgaaggtccttttgctttttgtaattattcattttgcatgcatttttcatttagtatcaggagacagttttcctgtttcccagtcaacttagccttactgaggtaattgagggcatagttagattagtttattagttctttagagattcattatttccatggaggaagagcataggccagtggttttcaactctggttaaacataagaattccttttttttaataagtggcctttgggatccagatcaaccaaatcacaatatttaggagtcagccatgctgtggttatttaaaaacaaaatgaaacaaaacctcccttataattaatgagcactaggatcggaaatcactgacacagacaaaccagttctgtattatatttggctgagagagagttaaatcaagtttatttaactaggtgcctattaatattttatgttgtattactcggtagaattcttagggaaagaatgactttttaaaaatgtttttcctggatactttcttaattcattatttgattctttttttctctgtagaattgggcttctctgaggcctgttaccttttctgtgtacttgatgataaagaagcccaagggggctggacacaatggctcatgcctgtaatcccagcagtttgggaagctgacgcaggtggatcacatgagcccaggagttcgataccagcctgggcaacatagggagacccccatctctacaaaaaatttaaaaaattagccaggtgtggtggctcatgcctgtagtcccaggtactcgggaggctgagctagaaggatggcttgagcccaggaggttgaggctgcagtgagttgtgatgtcatcctgccactgcactctggggtgagaccctgtctcaaaaaaaaaaaaaaaaaagagaagccccaggacagtatgatgtgcctgtttcttagccccaaagatgagcctagtttctttctccatataaaatatttttgtttaagggaaaagagacaaatttgactcttgaggtattgtgtgggtagacacatttagaagagaaggttgagaaattaaatctggtgttctcaccatgtgctgtagtagttattagaaacttaatgtggaatgggatttgtttttgtggtttcaaatgacctttcggatatggtgagttatttaaaaccccaggtggcaaggtgagtcttggcacattactgatctaggaattgggcaggagatacacaggcagaaaaagacctttctgggcttctctttatattgtgtgtctctatttctgactatttagttagagcttcctttgaatattttattatctacttggtttataatcaggaccacccacctgattttagcctgctgactcttttctgcctttttattccctcaagcccacagtgcatgtgtattcatgtttttgctttccattcacggagatctccagctgggaaaatatagtgtgtacaatactctctgccttcagctgacattgctcataaattgcaacagaaacactgctatcagcagcttaatagcaggtagaatacagctctacatatcaagtctcagcaggatacagaaactatggttaccaaatttccaaaggagaaggggagggggtagaaagttttctatctaagaataactgaaacaacattgaaaattgattcactgaaagcagctttttgaaaacgacttataagggctgacccagtggttgctctgctgtcactttttgctgaattgttatttctgaagacctcacaagaagggttttgtgtgatggaacggtatagaaaaggcaagcttgtttgcttctcttccttcctttctctgtctctgtctcttatagttttaaaagaaaagaaagggcctttgataaacttaatgaaaagtgtactggttaactgattctaaagtagggtgattaggtggagttaggagttaccctcaggcacactcaccgtcatacataggcatccctggcagaggatccacgcctatgacaaggaagaagcgagccttgctattagttttttctcttagctacaatttattttatcttgcgtggtgactcgtccagttatttgacttctggtaaaatagcacacatttacatagcatatcaagacgttcatattttaggctatgatgtgaaaatgggcagtcttatagagcctttccattaaaaaaaaaaaaaaagaaagaaaaaggatagctgcacttgtgaaaatttccagtgctttatttagcacatcattttatcttaataagtgagattatattaatattttgaaaagtcccaaattcccctctatctctgtgaagaaaggattgctgggctccgtcatcttttgtgagtagccacagcagaattctgcctcttgccagaagagattagtgtgggtggtaaaataattctttctttaaaccaagtaaagctgttgtattaatactcctgtcataggactcaggcagataaaaagctctcagccttgttccaggctccttagtgacttctaaaggaatagtcaaatatatcctattcccacctgcaacccagtccccaaaatactggaaagtaattaatcaaaattatcattccccatttctttcctggggaaaactcaacacagtttatgtatatcttagtttgtataatgtacatttttctttaaagtctgttagcctagtggctctgataagaatcaccttggatccttaggggagagctagggattagtatctgtaataaggactcaggtgtatttttatcatctggcgagttttgggaaaacacaggagtctgataagcctaggtatgaaacccatctataccatcctccaggagtgtgtgtgtgtgtgtgtgtgtgtgtgtttgtgtgtgtttgggagaagggattcatggattttttgaaccagggacccaggttctgaaacctacgctatagttcctccaaaaatggaagctgattcttaacatttggaataagctagtgccttgcagcctatagcgttcacttggcagggacagcccatttgttttgagtattgtattgtatgctgtccactgttcccgtcaggtccctgggtgctgaaccatctccatgagagcaggccgtgtggtggctgatgccatgctgagaacacctcttcttccattgtggaaagcacagacagtgtgcatccgaggatgcagccccccacctttcagccagagtggctatgtaagccttgtgataaaatgaagcaagtagagcaagaggcttgcaatgcaagtttagataaactctattttgtaatgtgatttcggtgggggatgctgagtcagtaggttcattcttgtctgccacgtgtccctgtcttatgaaggtgctatcccaggaagtctatggtcatatttaccagaggcagtaaagtcactactgctccatccgattttttttttcttctcagtgcactaaatatggtgctaaatgggttatattttagcagtatgccctttgcaataggtagtcttctggttccttctcttcaattactttatgtgccacaaatctgagacatttgggtttggctgtcttgctaatgaggaagtttaggattaaatgaattggttgaatgattgattaaatgaattgcttcctgtgtcaccaactgaaggactttggttattgcctagtgtattggccccttctttacccagacctcaaggaagtcttgtcttaaaccccctattctccaaagcaatttctaatcacttagctttgtgttagtcttactggggcaaaattcccgaaaggctcctgggcgtgggtcaggccttccagctgtgtgatgggcgttaaaggaacattatgctcactggagaagtgctgagagccaggcaactggtgtcctgatggccacctaccccagaggctgctgtgtgggggcaaaggatcactggaagagaagaaagttagagatccaagtgtggtttgggctctgtttttggctctgttccaattagttttagggcccaggactagccatttaacctctctgggccctagtttccttcttgataaggaggacaaatatggaataagtgatctccaagattcttttgtgcttgaaaattacgtgatttttttttttctgtgtggtgttttgttttgttttgagacagggtctcattatcatacctcactgcaacctcagtcacctcaaggctcaaatgatcctctggtctcagccttgtaagtagctggaactataggtgcaagccactacatcctgcggtatatatagatatatataaaatatatatatatataatatatatatatatatatttttaagcatagagaaggtctccatatgttgctcaggctggtctcaaacccctgagctcaagtgaatcctcctgcctcggcctcccaaagttctggtattacaggcatgagccaccatgcctggcctttgttgcttgtttgttggtgtttattttatatgagttctagatgtgatatggtgaagcttattgtgtgattcacgtaccttgtcatgtatatttagcacgtgaccaactagagcaaggggcaaagcccttgagttgagggccaggagtcttctgttcactctctttgcaccggtgtcttctacatgggaatactgggtaattgtcacaaactgggttccatttcctagttccacagattactgcctatgtgatgttgggcagttacttattgccttccttgtacctcggttgtacgatagagataccataatatagtacctcttgtttgggtggttaggaggattaaaagagttaatatttggaagacattttgaatagtgcctaacatagtcagcatgatatgcacttgttaaattaaacaaacaaaagggcaattcccagtgttataatatttgttctaggcagagacaggggtgtctgtcattagcatgccagcatgctgtctataatttggaatttcaacatcgaagaccctgctacttgtagatcttcttacagttatcaacaatggtgttgatgttgccacttgttttcttccagccacggtgacggtgggggtgggaggaagctgtgttcaggggatgaatgcagtgcaggacttgcacagaatgaacactctgtccccaggagcccagtttcactgattatcagaagcagctttcctctggggtcaggtggaattaaactataggaacacatgtagttgggatcagtgctttatgtataaatgctttgtaaaagatatttcttgccccccaccattcctcctgccatcctaacttccaaacccataccaataactttatttctttaatgtaatgactggggttgtgaatacagtctaagtagatgttatcttgaagagttgatcttaaatacttcatgcactcagggatcaggcagttcatttttactttgaattgaattgctaatttatattaagtagattaaaatttatgtctctgtaatctgctgctccagaggataccttctgcatctgtactggccatatttactcatatattgattccacgcacctacattgttggttactgtgaccatgtgtttttggaatgacaatttttattaaattttttcattattttgtgttctattttatagaatatatgcttgcatactgggatttctacatatttgccaagtttctattttgaaatatgtctttacataaaattaggctaatttaattaactagggttaagcattaaaggccataaattgttaaacagatgaaacacacacacacacacacacacacacacacacacacacacagagcaaacccagtttgtattttgatatttgagttgtgataaaagtagtcacattgagttaataatcttccagggctgggggagcggaatgtgcctttgctatattatgaaggcaagaaaattgaagtttttttctttccatttctttcccttgtattaggagccaggtacatgattgctagtagcctaaagacctgacattttaaaagaaactactctatttgtattatttggagagcatgaggtacccaaaagcacactgggaaagaaaattatcttttagtatttcagctagtacaagggaagtgcctattagaagcaatgggccgcttgaggacatggattgcatccagtagtggcgcattcaccaaaaggcagatgaaaataatctgtaccaacaaggatcacaacaggaaacatcatctgaattttccactattgacaatcttgactatctagcctgggatttgcattgccaagcaacacgttaaataattttgtatctctttgaaatcaatttctggtgatcacacatgcagattgaaaactatggctttaagatttacgttcagtgaataaaatttacgttccctgaaaggcaaagaaggctgtcatttcatgcctcctaaccttcattgtttatttccctttggtacacacaagcaacctagtacgcacaaacgtacatgcccattatggagagatagctttctgctctgtcaactttgttttataaaagctctgttttctttattgcctttatctattacatctgtaaaatttattttaagcaatgacaaatccctctttggggcccagagtctgggagaataaccactggcaggctattgggaggagatttgttggatatgactgttcattaaactgcaaggagtagtgggagaggccaacagtctggatctgccatggctgggcatgttatgggctgtgtttagagcttctacatcaggtgagagacaaatgtacctcatcaattgcttttgtaatagtccaataaaactggatggctactgaaatctcaggaagattcctgatttctttgacttgtgagattacttattccacaaaagtttctaataaaaaaatagaaatacataaaaccaaattgtttacagctatatcgtcagattattttaaaaaaggaaagaaccaactgagacaggctccttcacttacgagatatcagaagcagctgatgaacaattttcacctttccagtttttacttttatatttgactggggaacataattataatgcaggagctcttttggctctgttgtactttattttaatatttcatgtgattgaagcatggcagttcagcaaattaaatttataaccattggtgtgccagtaagtatttaacaactggctcttgtggtgggagttgcagggagagagccctgatttgtaacatttgctgttttctttggtgattatatcaccaccgtggtcagtttcaagtttccagtgtgatgtcactgaacatggtatttttttttttttttggggggagatggagtctccctctgttgcccaggctggagtgcaatggcacaatctcatctcactgcaacctccgcctcccgggtttaagccattctccctacctcagcctcctgagtagctgggattacaggcacccaccaccaagcccagctaactttttgtatttttagtagagacggggtttcactatgttggccaggctggtctcaaactcctgagctcgtgatccatccacctcagcctcccaaagtgctgggattacaggtgtgagccactgcgcccagccttgaacatggtattgagaagagatgcttgccacctgcagcacatgcctccaacataccactatcatcatcaagatgaccttagccttgtgggtccccatccatacatgcaccattccttcatgacactgtgttatttataaataagtttatgtaaacttataaagtgcatttagaagtatggtatcagaagtcagactgcctgtgctccaaatctctgactttctgacctggggcaagtcagccagttaagctttccaagagttactttgctcatcagtaaaatagcaataataaaaggacctgacacacaggctctgaggaatgaatgagataagctgtataaaaacacttattcttgcgacctacacatagcatagcaaagcactcaatcaatgttcctaatatttattttctgtctttatcccctggggacaataacaaaaatgttaactgcctagtgtgtaaaataatgcttattttattagttttgaattgccttcttttaagcttcagaggaagccccaacttcaacttcaccaagattcagtgagcaaatcctgagttcagtttgtccataggcttacatttttagtgatttcaattttgacctcctgcagtttccatctttattaactcaagacttaaaatttgtagtgtgtcttttttcagcagctatttgtatattttgttttttttcctctgaattgtttcctaacttatttctaggctataagaaataggacgactcaagaaagttcattatataagaacaggctattattttgttttgaatgctttacaacatatgttttggtcctgttagcccatcgtagttatgagcttaatgtgctatgatgttgcattcttgtttgttaaaaattaaggatttgttaaaaatttaagctacagatacaggactacaatttaaagggaaaaggttaattgcaaattttaggtttcccttgatctaattctctctaatattaaaattaagtagaactgaaggcaccagaaaatgtaatnnnnnnnnnnnnnnnnnnnnnnnnnnnnnnnnnnnnnnnnnnnnnnnnnnnnnnnnnnnnnnnnnnnnnnnnnnnnnnnnnnnnnnnnnnnnnnnnnnnnnnnnnnnnnnnnnnnnnnnnnnnnnnnnnnnnnnnnnnnnnnnnnnnnnnnnnnnnnnnnnnnnnnnnnnnnnnnnnnnnnnnnnnnnnnnnnnnnnnnnnnnnnnnnnnnnnnnnnnnnnnnnnnnnnnnnnnnnnnnnnnnnnnnnnnnnnnnnnnnnnnnnnnnnnnnnnnnnnnnnnnnnnnnnnnnnnnnnnnnnnnnnnnnnnnnnnnnnnnnnnnnnnnnnnnnnnnnnnnnnnnnnnnnnnnnnnnnnnnnnnnnnnnnnnnnnnnnnnnnnnnnnnnnnnnnnnnnnnnnnnnnnnnnnnnnnnnnnnnnnnnnnnnnnnnnnnnnnnnnnnnnnnnnnnnnnnnnnnnnnnnnnnnnnnnnnnnnnnnnnnnnnnnnnnnnnnnnnnnnnnnnnnnnnnnnnnnnnnnnnnnnnnnnnnnnnnnnnnnnnnnnnnnnnnnnnnnnnnnnnnnnnnnnnnnnnnnnnnnnnnnnnnnnnnnnnnnnnnnnnnnnnnnnnnnnnnnnnnnnnnnnnnnnnnnnnnnnnnnnnnnnnnnnnnnnnnnnnnnnnnnnnnnnnnnnnnnnnnnnnnnnnnnnnnnnnnnnnnnnnnnnnnnnnnnnnnnnnnnnnnncctgaatggaatgctgtactcttcaccctgaggctatccagtctgttgctggctgctcacaaatagagctactagtttccactgaaaaagatctttagttattttaagcaaaggacatcagaaggaaataataggtttctacctcattcttccatcaggcattttcctgccctatatactaatccccacagatatctgccatgaaaaaatttatttattgttccaggtggcaacccccaagtgttagcattgtccagccaaacattctgtttgcattggtattagatttactggttcagggactgtggcgagtacaaatcagatttttgtccagaagtgtgtgtgtctgtgtgtgtgtgtgtgtgtctgtgtgtctgtaactcttgagagaattacaaggcaacctgggaggatgctgaaatatttggtcaggttttctttcagtgaagagaggtgtataaaacacacgctgatgatgagcagcaattaacagtgcattactttctggaaaaggcttgaagtcggctgccctgcaggtcagagtcaataaagactgagttactaacaatagcctttctcttgctaaagccttggacttaaccctaacttcatgagaccagagaataagagaataatgcgaacaataggagtcttggaggttgacttgggcctaatgcacagaggcagtaaaagctgtcagagagtgtgattgattggctcacacgccttagtccccagtgcgaagcactaatgttcctgcctcttctgagagggctgatgtgccacctggggtcagaacttatcagcctgtggggctaatgtttcagatgaggccaaagtgcagtcaataatttatacggaaatttgtgctcagattcgcaaggaaagcaggttttgacttgaattcctcagtcatccaagaaagaagtcagagccaacttcagatcttcctgctaacatcgctgctgtgtatattaatacttaagacaaacgtcaattgaagaagacaatttaagtcatcatgaagtatttatttagcagttaacatttggagccaaatttcaggagtttcagaattgatcagtgaaatggggaaaggaaacagcagcaattttgaattcatgaaaaaacaaaatcacctctagaatgtaataaccaggtcaggttaaatcagagtgacttcggaaactattaagtgtccatggggagggttggtttacaggccctgaaattgaggttcatgatactatgatactaacaacatggagagaaatgttaggtgatatcaaggactagaagagatacaaatatcggagaggaattagatttcagttagatgccttgaacacttcatcctgtttgcagagaacggttagctggctgtgtgtgactgtgtgtatacagacgatctcagtgtctgtgtaaacacacgtatttacacacagagtatatagaaatagacagtaaagcagtgacaccgagcaggctggtcaatcaataaccagctaagttttgttctgctccagcaaaatgacgactttgctccagtaagtgctaacaaaggcccttttaccttccctgtgctggaggagagcactattagtcacacttcattaggcttgtttacagaaaagagctggtctctaagcacgttattgaaatacttgtaactctgtggggcttttttttttttttcttccctgaaagataagaactttggaatgtggaatgggggagggtgggaaggcagcctctgagtgctgtcaagaaaactggtgggtccagatgggaattggaaagatgagttcatgtttaacctgctctgtccatctgcatccccagagccttgctgcagagtctcatttctgttgtcacggtactggggagctttaattttggcttttgtaatttagacaaatgtcaggcattcagttagctgttcctgaaaacatgaaatgaggttttcttaccctgaaatagtccagagatgaggcttcagtgatttagaactgcatttctcagttgcctttactattgagtagtcagaggaaatgtttgctttaaacaatggatgggttaggaaagataaattttatatcatttgaaattggtggtgggtatagaaataataaaagaagtccctcaggttggaatttgcagcccttaagattctaaaagaaagataggccacatttatagtaagcctggtcaccagcaatgtgggataattagtgtagatgcgcataactgagtttgcttcacctgggaggaatgcgggagggcttgctgccagctgcatttctgagtgtggaattcatagcattttggcatctccttccattcttcagcttatgacctgggtgagttacaggagagtttaaaagatgaggacgccgtagtacatatgctgagtggcttctttatgccagtgctcatgttaaatactttacataaatcacatcttatttaatatccatattactcccattttatagatgaggaaactgaggctcaggtaggtttaggttagctcaagatgaagcggctacaaagctggttgtgaacaggtgagtctgcctctgtctccagagacatgctttcaggtgcttagggtgctccatttgatggccactgtttattctttcttccttcctactcctcagaaatgactgcagagttcatcctttcagctttccctattgcattctgaacctgagccacatgctgtggcttctctaccagaatgtgggaactacttcccacactgcctgcagggcatggccacctccaggaagaacagggaggttcaccaacaacttaagcctcattcaccctgccgccaaaggtgaaactgagtctggtttctctgacattcatattccttgtttcctttctagatttgcaaagatggtggctttttggtgacacacaaaatgtacccctttgtgtgccatatacatgcagatctctcccattctctctctcacacacacacacacacacacagagttaagagaggcagttcttctgttttcggctgctgttgtaaattgctattttaaatttcagtgaatggaataatagcagagtgatcatttccagtaaatgttgttggcctttgtaaagaatagcttgttcagaggttttatgatttacagaggacacagctggtggccagcagagcggtaggaatgtatgctctcctgggcccggtatagctagagatgaaaagggcccagagctggcacaaaagcaaataagcgctctgactttaaataaagcatcataatttataggaagcctggctcttcaatcccagtgagacacatggatcagtagcagctttttgatgtggagcataattgtcaattggttcccactgtctccttacagctcaaggactggggatggtaagaaattactttaagatacagtcctataatctgtagttgtattacacatattttgacaagcaattcaatggcatttaaacctggaactctgctaatcacccatgacctactgatctacaagaggtggtgggtttgtgaggaaaactaggtgatgagaggagttaggaagacaatagctcctatttccttttccttgcctatccctccccacaaggcatgagatttttcattcttacattttatttcctttgcatctttcagtttcattcatcttggtaattactttgccttcctgcctgctcctccttcctttgctcctgccactggggaagaattgggcaagaaacagactatgctgccagatacagaaaatacggaagtggcagatagctgttaatgacttctcaaattcagagcattttacacccttctacgcccttttagtcctagagtactcgtcttttggtgagtggcatggagggggagtttttgcctgaaggatgatttatttttgtctggcttgctgttctctttacctgtttttttctagtcgaagtaatggcatcgtggagagcttgggtatctgagttgttaacttaaaaaaaaaaaaatcctgtaattaatattaagtgcaggaaaggactgggaccaatgatttgaatggctgcactctttcagttgcttatcttcagtgacctcctgagtctgacagtgggagtaagtgaaagctgtttccctctcattttgacagaccctggccctgtgctatgtgcccagggccacttgtaatagccgtcttctaaaataacactcttaggaaaggaatgaccattaggaggtaataccacaagatctgtgtcattattatggctcatagtaggcctagttcaataattacaaaatacctttcccaaactttttaacacttttatttaaaagaagaaaaatgtgtcctaacaagctaatgatacaagcttgtgagactggattggggaggggagtcaattctgttacagtggggcattgaacctttgtcttcccacaaagagagggaggaggaagagaaggagaaagcattctgctactctaatgaggaaatttggctttaaaaaaggagagggtttgagaaacctgccccacactagaaatcgtcatccaaactcatcagatttcagaccaaccagtggtgcctgacaaggagcaggagaaaaattaagtttcaaacttggcattagaaatcagagtgatgctgttgcttagtttggtggcactaagcctcaaaggaggcagctacttactaggaagtttaatcaaagacaagaaataaaaccccttggtacaaatgtatacagacacacactctatacatgtacatattcagtttatgcatttgaattgctccaaatgtctgtctcagaagactgtatttttttatttgattctatcttcctgtcctcctttgtcccttgcatcctgctgtgtgttgactgagcgctgagggaccacagcatgaaggccatcccttttggggtacagggggtggcttttgatgcatcccagttaaatgtctgacttgctgaccttgctgaagcaagctcaggggacttgtcttcttccctcctcccccaacactatcacctgaaacctgttctgcctgcctgtccccaaagtagggactccaggaaccttagcaggaactactagaggaacggtctacacaataaggggtacatattgtatatgaatggtgcagtacatatattttattttattttaaagctggcctcaagtcatcaagggcaatgttgctttaggatatgtatgtttgcctaacttaaaagcaaatatttttgttactgatcaaaattcctgattaaaaattactttctaaagatctccatgtgatttttttttatgatgctctttgttacttaaaatgtctaaattacacctatgacattttgtaactaggacacttgcttggtagaacatatgttttgattatttaaaagaagtaaagcatgtctttccacagtaaacattaattgatctctaatgatctgtttttgtttgtttgtttgtttgtttttttgagatggagtctcgctctgtcgcccaggctggagtgcagtggtgcgatctcaggtcactataagctctgcctcccgggttcacgccattcacctgcctccgcctcccgagtagctgggactacaggtgcccaccaccaggcccggctattttttatttttttatttttttattttttagtagagactgggtttcactgtgttgggcaggatggtctcgatctcctgacctcgtgagccacccgcctcggcctcccaaagtgcagggattaccaggcgtgagccactgcacctggtctctaatgatctgttttgatttagtatttcttttcatgttatatcttgggccctgtaagttttcactgatgcttaaacttggtcagtgaaaatatcgtcaccatctatatgtgcggtgcagcctcccacgtgaacatatgggacagcatcttagtgttaccggtggtgccttataaaagtcttatttctgctccctcttcttactcacaagactccttaacaggccattgtatcttctagaagtgggaaatgataatgttactagggaagcaagaaaaaagcagcttgggcttcttttagctgaccagtcagctggatattgaccacctgtcttcatgggaaagaaatagatggcagtgaataagcgagagtctagttttccaaagaagctcaatgattttcccaaatcaatacagctcatcaggcctcagaacaaaggctgcaggggaggtgacagtgatggaagtggctctgtgttcttttgtgtattaaaccataaggcccatggggaaacaaggtttctttagctgtgtgtgtgtgtgtgtgtgtgtgtgtgtgtgtgtgtgtgtgtgtgtgtttagggcttattctgtgtatttagggggaaaatcctttcagattttttttttaaaaaaggatttccatagattgtataccaatgaccaaatgtacttttgaaagagataagtacagtcaagtaagaaagattatcatgttttaaaatgcagagtagaacagcatttttccattgcttttgttattgcttaaggtttcattttttgttgtcgttgtatgtggattgggtttagatgaaccaaaaacaagtctgtgttcagattaacctctggcaaaccaagaatcgtaactaccctcccataaacaaaccctgttcctaatgccctgaaaataacaccaaaccctaataggaatgctcaactgtcatctgagaggttataattaacgcagatagagtgatgccaacatattccagccgctgacagagaagatctatccaaaccagcaatttttagcccttcagtcctttaatctttaagctcactgtgctttcataaagtagtacattaacaccagagcagtgtgtctctggggtttatgactggggtggcggcacactagggcataaagtgtttcattacacttccttttgttagtactgccctatctcccaagctccattgccatacactatttgttcagataaagccctatgttcagggtgactaatcgcagcactgtgttccagatggtttgattacaggatgtgtttaaagtgactcttcaaacattcagcccagcggtagggctctttaaaaaaaaaacatactgcattttatggtcatgtgacaacacttacttttcctgtcctagtgctctatatatacttggcacaggtaatgggaaagtccctctgatttttggctggcaggtattttatgagcaaccttagttgtacattttaaattttcccaaataattatatttgaagaaggatctgtctgaaggttataagctccgaggctggaacagcgaagcttgtgctatacaagattcagcctttacaaagtaccagtattgaataccacagagtgacgacaacataataatggggggagggagtcctgaacaaagaaatggtgataaatcataccttgcacaatagtcacgttgtgtaaaaatggagggtaatatgatatctgaaatatatgaattttatcctgtactcatgaaatcagcatattgtgacattttgtcaccaatgtttcactagaaaaaaatatataaaaggaaagaaatgtgtaaactttcttttttaaaggcatatggcatgaatgggttaccatttggtgttattcgaatgaggtttctgttttctgcctggatgcacatcaaatgcatccagatgtggtagtctgagagagttcaaaaaaacttctgtctgattccaaactcagcatttgcgatgcttggcaaagacttctgtcccggggatgaggcactttaaagactctgaagcagtctttaaactcaatacaaacagaattatgtcaatccactgggaaatcaggcatttgccccgttcttgaggaaacagcttcacaaataccagaaataataattcataaaccacatttataacatcttgggagcaaagcctctccacagagaatgtctatcatctataaaactagtgggagattatgcttattgaaaaagtatggtagtaataaaaggaagtcactgagtaggattcagtctagactctctctctcgtcagtcctcgtgtagttagttcctaggtgtttaatgaattctcactattaggtagccactgtgccgccaggggttgtgggtgcagacactgctcctattttcaaggagtgtcatctagttggaagagttaggcatactgtgtatacaagcagagtaaaatattatgggggccatgtattacggtaggacaaatagccttaagttcagacctgggaagttctccttgtcattcagggtcccagatgaaggagactctgccacctttatcctgaggacttcgagatcacaatagccatttccattgcagccagacagaaagggatgagaggttcttatgggccaggcctggaagtggcccacattcatcagttctctcacttgctttctgtaggactcagtcacatgtctgcatcggactgatagggaggctgagaaggagtctagttgtgagctcagaaaggggagggaaacatggctcgtacgtttccatcagggcaagaactgtgtatgcagtgctgtggggatccaggagagaatggctgtcttttggcagtgtgcctggtatgcgtgtgtctagggcaaggattcacagaagtgagaacctttgcatttgtctccatttgcttctaattcattaggaactttaactttccctagggatttggactaaggcatcttcaaggtttcttttaggggaattaaaaatgtgacatgaagaacggttgaagaaacttgtctaggctggagagtaaagaagacatagaggctgggtgtggtgggtcacactgtaatcccagcattttgggaggctgacgggggaggattgcttgaggccaggagttcaagaccaccctgggcaacatactgagagcccatctcattaaaaaaaaataggaaaaagacagtgagcaggaggtggggagaatgccaacatggtcattatccttgcctggatgaaaggctgttgagtggatgatgggtggactgcatctgcagggtatcaggaggctcagccaggaccaaggtattcaaagacaaatttagtttaacacaaggaacaactttttaacaagatggctggaaaataggcaatcctgggggagtgctggtgaaatcttctatcagtgatgaagctggagagaaaaaggacacacacacacgcacacaaagtcctgagggtgttgcaccaacagtgcagttggcttcctggtcttatagctattgcgcccttggaactttggcccatcatggttctttacgcctcttactatcttgcaagctttaggcttctactcctattgccagttctttggaacttccatatttctcattcagattcccaacataagtccctgttgggctggctgcctttgctccaggtgcccatcactggtccagtcagatgggggcagggttaggatcactggtctaggtgggggcaccatgaacatgaaatccagggtctagcctgacgtgatagcataaggggcctactgtaaaaatgcaggtaatagacaaaactatacttccacttgtgcatcacagtgtatgcctgtgtctcttctgttcttttcatgcacagactcttgaagtacagagtttggatggagctccaagtaaaacatggttgattccatagcactaaataggcacctaatgtgtaccctgtagacacacacaataagtgtttgttgggcttgacatcttcctggaaaccctttacaaaggacataacagaacactgactgaaatccttatgaggtctcaggcttttttggcttgaggaagtaacaggctcaggttatataataaagaccttgttcttattaaatgttctgtaggtaataggcctttgggggcagcatcttagacaaagtgttaacagtacaaagaagaaagctgtgtgtggtcagcacactctcaaaccatccattgtactcttcagctgtattcttactttattagtaataagcctcagatgaaatgttacagggcattagctctctgacaaaggccaggcccagtccatgggtggaaagggaagaataataaacctggtagaatacttgaatataaagatgaaaagtacctgtatagaacgtccccaacacctagctcactggctagatgtttgaataaatgtgcgtgaaaagaaactaatctttctggaataagtgtacacttatttccaattcacatgtgagaaatagaactttatgcccagatttataaaatacaaatttgcacttttaaagaactaattttcatcatgggcatttatgccttcagtaagtgtagtctgctttatgtgactgtgggttataaaatgttcaagattttgagatttcagcaaaatgataaatcatttacatgttttagaacctaaacaccgcctttatacttggcccttcacaatggggtgttgtctaaacatagaccttcttacaaagaaacagtacactgtgtagtttatatgagaaacattccttaagccttcattccaatatagagtggcagatttggctgtgtaaacatgtgcctgtatatattcggatgtgaattgtgggcagatttaaacactctgtggcattgtgaagcggctcgtacatataaagaaagatagacacaagcacacatatttaattagcactgcttgatggagactgttcaaaatctccttgggtgtaaagcatttgttttgagcattttaaatacggagtgcttctggaaaaataagggttacttatttaggccctttgaggttgaaaatggatttttctttccaggacttgattccttccgagtgcaaataacaacggcatcacttgtacttcgataagaggtctgcttgtgtggcttccagaaagagcagcaggagatgtgaataattttacagtgaggaagttgcaactgcagattagcctttgtgacagcttcaacctgtggccccagataaccagtgattaattgcctgccctgggtcccttccttttttcagactccaggtttcccttgagcctgtattgagacggtgaatttcgttctgagggttctgcgtgggccggcgtgttgtgtggagccgcgtggcgcggggagcgcagcacggtcacgcagaccgaagctttcactgcacggccggactcgttagtgcgaatgagcctgtgtcccgcgtgcaccgagggagccgagcagcgcaggcggccctctagccccgcacggccagcgcgccgtgggggatgcgtccctttgcctccgccacgctcacctctacccgaccgctgcctctgtgctccgggcggccgcctcggcccagccaatcagacgcgagtgctcgcagcgggcgccggccaatccgcggccagcgttctctggaaacgcgaaacccttaggggaaaagcaataacaaaagcctttcactgcagacaaatgttaagtgtctgtgcagacttttcctgtttttaattttattactgcaagaatggaaggtttgttgtttctttcatgtttcctttcaagcaattttaattatatatttgtgctacatcaggggactctggaacgcagtgattcagcctattggatctaaagctaaaatgcagtaaccttctggcagtacagatatattcctgcactgtaaatatagctgacatgctaaagaattttaagcagctgcaaaggtctttgacaccacacacagtgccccagagagaagatgatgagaaaaccagctcagtcttcccctttgcctcctctcccaccccctcccctttcctgaagggatgtgttcataaagaatcctttcctccaattgttctgtcttgtgcagattttgaccaaatgcctaattaccatggattctcatcgcaataggaaattttatacacaatggttttaaaaaaatttcctgagggaatttcattggaatcagctatgatttgaggaaatacttgctttgctccatcctagcctttcccctgctagcctattgctacagtacactgaattaacacagagtaaataattcagctgttgcctaagtaatagcaacatagaccatatgggaaacaattttaaaatctccttttgagactttggaaagaaatcgttctccattacttgagtcccaaccattgaaatattttacctgctgttaaaaggttcccaaggaaatgagtcttaccttgtcaggtttcccttactgtaaaggagcccactacaggttttctgtaaaattcacaatggcaatggtaatgcaagtgagcaaactagctagaaacagattttgactaatgtcttctggtgcttccaagaaagagtaggggtagatgcagaaaagaaaacaaaggctcagttaaatattttatttctttaccctaataatttatgtatgtctcaaaatcaaggttctattaaaatatgctttaaagaagtgatttttgtaatttggcatttgtcctctcagaaataaagaggatattatattttctctgtgacatttggtatactaagcacacttaagtttagtaattcacagatgcagtgctaaattaaattgtctgtctgaaaagcagttggaaaaagcagaatggcttgcaggaaacgagtgtgttagttttgagatttcttttctaatcctctgaggcaaatgcgtaccaaagttgactccaaagataaccccaagagtaaatctattgtgcacatttgttttcttaagagggctattttaggagtccttaatatgaaacaaaaccaaacactgaaacagatacggtacccaggctgattactgtctcacaaagtcaaagaggggaggattagggaagtgaaatcgtagttgattgtctgctatctggactcttgagtccccactctcctgtctatgcctatttttatgcacctgcataattattttttcttaataaaaatcaccatcattttatattgttgaattggaaacaaaaccgattcctttcagtcaccctctggtttaagcactggtaactggcgctagtttatattggctgcttgccaaacgaaagcaattatgtgtaataatagaaaaattaagaggtgagtgttgctgttttacagcaggacatggcaaaaaccatttccttctgtcagcagtatcttgattacactctcacacacagtctcactcctttgtaccacatgcgcacgcgcacgaatgcacaacacacattatttcctgtgggttttaacttgaggtcactgaaaccagaaagaggaagaatgcaaaccacagcttttaaaagcaaatgagaatagaactttgctggcaaaaaaaagagaaaaaaataataagtgaactggaaataacagtaatcagtggtaactatgatcctttttcatcccctgcctcctgcaggtgtcctagtggtcaatgtcacgtggaggaacaaaacgtacgtgggaaccctactggactgcaccaagcacgactgggcccctcccaggtatgaacagggccttttatttctctccttccccatcctctctttgcagggaaactgtagagagagattcataatacataaaagtgtgcctgtaattgaaaccaggcaaaggagaaatgagcaatttaggattgaacgcagtaaaatgcagatgctaaatttcttttctatcagaagatctctgctccccaccccttctctcctgtctttgttttcattttttctcaaagtgggaatttgaactggtttggaagctagctacttgagctgtttttctttggtttttctgaggaagaatataagcccttggtcgcctgttcttttgcaggtgttggaaattgtcagtcttttccttgactgggcccagccctgaagctactggagtgttgactcctctttactgcattgtgtactttgtgatttcacctggctcttttggggatgctcattttcacatctgttacttgcttccataggttttgtgagtcaccgacaagtgacctggagatgagagggggccggggcagagggaagagagcgaggtctgctgctgctgccccgggctccgaggccagcttcacagagtccagagggctgcagaataagaacagagggggggccaatgggaaagggaggcggggcagcctcaatgccagcggacgaaggacacccccaaattgtgctgctgaggatatcaaagccagcccttcctccaccaacaaaaggaaaaacaagcctccaatggagctggacctgaactccagctctgaggacaataagcctggaaagcgtgtccgcacaaattccagaagcactcccactacccctcaagggaaaccagagactacttttttggaccaaggctgctcttctccagtgttaatcgactgtccccacccaaactgcaacaaaaagtacaagcacattaacggcctgaggtaccaccaggctcatgcacacttagacccagaaaacaagctggagttcgagcctgacagtgaggacaagatctcggactgtgaggaaggattgagtaatgtggcacttgaatgcagtgagccaagcacaagtgtatctgcttatgaccagttgaaggcaccggcatcccctggtgctggaaacccacctgggaccccaaagggaaagagagagctgatgagcaatggcccaggttccattattggtgctaaagctgggaagaattctggcaaaaagaagggccttaacaatgaactgaacaaccttccagtaatctccaacatgacggctgcgttagacagttgctcggcagcagacggcagtttggctgctgagatgcctaaactggaagcagaaggattaattgacaagaaaaatttaggagataaagaaaagggcaaaaaagctaccaactgcaaaacggacaaaaacctctctaaactgaaaagtgcccggcccattgcccctgccccagcccccactcccccgcagctaatcgctatacccactgcaacctttacaacgaccaccactgggacaatacccggactgccctccctcacaacaactgttgttcaggctacaccaaagagtcctccgttaaaacccattcaaccaaagcccacaattatgggagagcccatcaccgtgaacccagctctggtgtcactcaaagacaaaaagaaaaaggagaagcgaaagctaaaggacaaagaagggaaagagacgggaagcccaaaaatggatgccaagctggggaaactagaggactccaagggggccagcaaagatttacctgggcattttttaaaggatcatctcaacaagaatgaagggctggcaaatggactgtcggagtctcaggagagccgcatggccagtatcaaagctgaggccgataaggtttacactttcacagacaacgctcccagcccttccatagggagcgcctcgaggctggaatgcagcactttggtgaacgggcaggcaccaatgggcacctctgcatgtgttgacccagaatggggcagagagttcagctgcaaagacaagcagcccggcctattcagacatatctgatgctgctgacgatggtggttctgacagcaggtcggagggtatgagatcaaaggccagttccccatcagatattatttctagtaaggacagtgttgtaaaagggcattcttcaactacagcacaatcatctcaactgaaagagtcccattctccctattaccacagctatgatccttattattctccaagttacatgcaccctgggcaggtcggtgcccctgcagctggaaatagtgggagcacgcagggaatgaagatcaagaaggagtctgaggaagatgctgaaaagaaagacaaggcagagcagttagattctaagaaagtggaccacaattctgcatccttacagcctcagcaccagtcggtgatcacacaaagacatcctgccctggctcagtcactttattatggccagtatgcatatgggctctatatggaccagaagtctctgatggccaccagccctgcctatagacagcagtatgagaagtactatgaggaccagaggctggcagagcagaaaatggcccagactgggagaggagactgtgaaaggaaaagtgagctccccttgaaagagctgggcaaggaggaaactaaacagaaaaatatgccatcggccacaatctcaaaagctccctctactccggagcctaacaaaaaccattctaaactagggccatcagtgcctaataaaactgaggagacaggtaaatcgcagcttctctccaatcaccagcagcagcttcaggccgacagcttcaaagctaagcagatggaaaaccaccagcttattaaggaggctgtagaaatgaagtctgtcatggactctatgaagcagacaggtgtagacccaacctcgagatttaaacaagtaagattgtggagcgtggccccaacagggagagagcagtctgagacttgtattatacatgtctgggcttgatctggttagacttctgacacaggaaagaaacccatattagttttttcctctgctcttgaaaaatatcttaagattctcaggagttactatgtagctctaaaatgtacattatcagtattttcttgtcatggtgtatagtaaaaggaactgtggatgggtgctttgcagatttgtgtttcatgccactaacttgctctgtgactctgatgaggtccattaatttctttttttaaattttttaaattttttgagacggaatctctctctgtcacccaggctggagtgcagtggtgcaatcttggctctctgcaacctccgcctccgttcaagcgattctcctgcgtcagcctcctgagtagctgggactacaggcacgtgccaccatgcccggctaattttttgtatttttagtagagatggggtttcaccgtgttagcgaaatggtctcgatctcctgacctcatgatccgcccaccctggcctcccaaagtgctgggattacaggcgtgagccaccgcgcctggccaggatcccttaatttcttagtccaaggcgagggctttccacaatggggctgctgaattctgttctaactctgagattctgagtcttatctctgaaatatttattttccattttcaaatttctactagcatcttctttgaagataataaaaactgggtccctgaattcacatttcccattaatctttttaatagaatttggggcccaaatttctttcacatggggtcagagatgcctagatttcagtcttactccctatattaagtaccccaaaactcagagctcagtgctgaatgtttgtgaggagggtgaggaggtttgggtggcaggcctcaacagctgtcccagagccccatgggtcagtcagcttgagaacacctgaaaattggtcaccacgaaaccacaaatgtactagcaccttctgtcatggttcagacatcctgacccactgcaaccccgtgagcattaatcctggttatttcccagcactgcacatccccactcccaccctcacccccatgcttagataatccctggtgcattagagcaagaaccaccagcccccaccaccgccacccacacacacacatttacttaggcacaactttgcatgttctctgagaacctgaatccccagtgggtttatatcatgaatgggatggggatcacaaaggccatttaggattctcagtttccccacttacagaggcataaatcaggctgtcaattcacagggctgcagaagatttatataattttgggggtttatagatagatggctttgttttccaatagagaagccataacgtgtgctattaatttgaaattttgttttgattaagatgttaacacgtaatgagaagtgagccaatatattaagcctcagctgcagtagatgaggaaaatgtattaggaaaccaagagtttttcctcctaagtgatgttaatagctatagcaattacttaaatttactattattagcttgagttggagtttttaacattcttttcacctgtgtgagatattaaaaggcaaacgaagacagaattaaatatgtctgaggatgttatttagtgttgagaaatgacattaagggcccagctctgaatttcagcagacctgagtttgaagcccagctccacgactgggcagcagcatgaccttgatgttgcctgaactttaaacactttggttttatcttctgtacaggggatcagtaataatgcctacctgggacattattactttgtaagagaaggaggtaaagcaattagcacagtgtctagcacagaaataaatgtcaacttagcattaaaattaagagtgctagtgctgtcatgattattaacaagttttctttaaaattgaaattttaaaacaaatctgttgggttttttttctttaaaacaaaaaaatcaggacccagattcaagaacatggcatcattatgtataccagcccaaatatctggatcagcaaaagtcagaagaacttgatagagagaagaaattaaaagaggatagtccgaggaaaactcctaataaagagagtggtgtgcccagccttcctgtatcgttaacaagcattaaagaggagcccaaagaggccaagcatcctgattctcaatcaatggaggagagcaagctgaaaaatgatgatcgaaagactcctgtgaactggaaggactctcggggaacaagagtggctgtctcctcacccatgagtcagcatcagtcatacatacagtacttgcatgcttatccttacccacagatgtacgaccccagccatcctgcataccgggctgtttctcccgtcctaatgcacagttatcctggtacgtgttgtcggttctgactatattggaggaaagaggcgatgttcaaatattagctgttaaaaactcaagataaattagaagcttcaagagtgacatttgttttccttgtttttatgctgtttaaagtcccaaagataaaactgatttaatataagtttttttaatgaaatgtcaagaatcctcagccatagtttccatagtctctgatggtctgctatagctgttaggctgacagatactttattgcctataaaaatattctaagcacttactgtcataatcattatagttactattcctttcacttaagcggacacgtaaatgtatgaaatggctataagctcaattctgtttataacctcccttcatcaggatgaattaactgggagaagaaaattggagaagctagacacagtttaatgatgatgtagcccattcttaatgtaaccccctattttaagatctctttgactcttatcccaaattcatgtaacccaaatgattttttttaaagatatagcctgtaacttgatgtggcatttgttgtttatctgcaggggcatatctctctccaggatttcattatcctgtttatgggaagatgtcagggagagaagagacagagaaagtcaataccagccctagcgtcaacacgaaaacaaccactgaatctaaagcactggatttgctccagcagcatgctaaccaataccgcagcaagtctcctgctgtaagcctccttttgttgttatttaaaagtactgtgatttggggagaaaggggaacaagctagagaacagtcttgaaatataaatggtttcggaacccagctgtgatttcaggatgctgttttatcctaatacgtaaagaatggagcgttcaaaagtaagacgctttcacacatgagagaaaattgttaaagcacgtatggcagtagcaagcttttctgttgcaaaatctagtataccttgcttacccaggaggatggttgttaggtggaaatttaaattcataggaaccaacttttggtgcaaaatatgtttgataagacattgaggaattaggtaacagaggagtatattttatataattttggtaagtaagtagttcagaggctacaaactgttgactttttgggcaaatcaagcttttcaaaaaatgttttcttgcaggataccttttaaaaatcagacattttacatgcaagttcagatcacctctttctcttaagacaatagaaaatctgggccgggagtgagccactgcctgtaatcccagcactttgggaggccgaggcgggcagatcacctgaggtcaggaattcgagacnnnnnnnnnnnnnnnnnnnnnnnnnnnnnnnnnnnnnnnnnnnnnnnnnnnnnnnnnnnnnnnnnnnnnnnnnnnnnnnnnnnnnnnnnnnnnnnnnnnnnnnnnnnnnnnnnnnnnnnnnnnnnnnnnnnnnnnnnnnnnnnnnnnnnnnnnnnnnnnnnnnnnnnnnnnnnnnnnnnnnnnnnnnnnnnnnnnnnnnnnnnnnnnnnnnnnnnnnnnnnnnnnnnnnnnnnnnnnnnnnnnnnnnnnnnnnnnnnnnnnnnnnnnnnnnnnnnnnnnnnnnnnnnnnnnnnnnnnnnnnnnnnnnnnnnnnnnnnnnnnnnnnnnnnnnnnnnnnnnnnnnnnnnnnnnnnnnnnnnnnnnnnnnnnnnnnnnnnnnnnnnnnnnnnnnnnnnnnnnnnnnnnnnnnnnnnnnnnnnnnnnnnnnnnnnnnnnnnnnnnnnnnnnnnnnnnnnnnnnnnnnnnnnnnnnnnnnnnnnnnnnnnnnnnnnnnnnnnnnnnnnnnnnnnnnnnnnnnnnnnnnnnnnnnnnnnnnnnnnnnnnnnnnnnnnnnnnnnnnnnnnnnnnnnnnnnnnnnnnnnntgagagctgtgtctgctgttttctggccttgactctttgtcatgtccctttaactctgctgaagtaatacaatgtctgtgaaagatggctcttccccaaaaaaggtgactgctctagtcctagagactgttgtgaagagagactaaacaaaaataggatggtgcttggctaggaaagagtttaaagtaaattaaaataatagtatctgcaatgtgtgtgagtctaccagaaactctatagagaaaccagaaaaggggatttctgaatctttttctgagtcctccttcttagtacaaggatttcttttaagtgagaagtataactttagttaaagggtggttaggctgtaaaggtagaaagtcataggaaatgaaccatccttaccccaaactatggtttgggaggatggggccttctctttgagagttcaaaaattgagagattcaaaatgtgggtgtaggacagtgatttcttgtgctttatattggcatataactttagagcatgttttttcagtagaacaaaatgtatacagacacgtttaaaactgtgagatatgttctctccacaaaatacaagtgtaattagaaaacttgaccttaaagatatctccaaaactacttattttgtaaaagttgtttatgggaagcaattgggtaaattcttaacctgcaattatgaatgaatatagagagaaatcctcttatttccgtcatttcaggaaaacattggtgtcacttggtttactttgggtggagtagttcttttgtgttggcttaattccaactgaaactaatgcatgttttttgaaattctctttagttactaaagaattgtatctttatatttactttttaatcattaacacaatattgtcgaagggacaaaggtggtttagtactcttaaaagttgattttcagagcatgaagggggaaaatttctcttttctgttgcagcctgtggaaaaggctacagctgagcgggaacgggaggcagaaagggaaagggatcgccactcccccttcggccagcggcacctgcacacgcaccaccacacccacgttggcatgggttacccgctaatcccgggtcaatatgacccttttcaaggtcagcagctctatcattactgtgtctttgtccattctgctttggaaaacagttgctaaaattgcatttcacatcttaaaaatattgagctttgagttcacattagctctcaggagggtttttaacacttattttctagtgacacagctaaggctattcccacatctttgtattctattgagacatgaaatggctaccacttaataattgtcaccagttgatgttatcggcagcttactgttatctcacagactgagggcggtggccagtgtctggggcactgaatataacaatcagaagatcagatatctacttcaggaaaattgtagaaaaagggagggatggtgggaagctttggtgaaattacttgttctgatttctgcatgccttttaagttgctcttttcccatggaaatcatgggagtaatgtgatcaggtttaacacttttataacctcattcgagggttcttcacagcccttcactgctgcgacttcactaaatgggagaattgagaaagagaaacatgttttaagccataggattgatatgagggaatcttcaccttgtagttcattagttgagcatgtattatttgtcccatctttgtcatctcatagtaggtgggtggtggcaccatctttacaacttgctagaataccacagattgcatggctttaaacaacaggaatttattttctcacagttctggaggctggaagttcaagatcagggtgccagtacagccagcgtctgctcaggcctctcttcctggcttgtgtgcagctgctgtcttgctgtgcgctcatatgacctcttctttgtgcatgagctggtgggtggggaaggggcaggggggagccctcgtgtgctttcttataaggacactaatcatgccctattagggtcccacccatatgacctgatttaaccttaattacctccttataagccccatctccaaatctaatcacattgtggattagagcttcaacatattttgaggagacataatttagtctattgcacttgccaagttgcctcttatgctactgtgtgaatagaaagtaagataatatgtttgaaggtgtttccaaaactgggaagtgatatacaaatgtgaaggggtcatttttatttattcaggtctttttagttgatgtcatctagtagtgttaaaagagagctttcctatttcttaaacaatttgtattgagtgtaataagaacttggaagagaaagaggttttatttctagtctaacacattatatctatatataaataaagtatatatgagaagaaaacaattgtctcttttaagataatattattgttattgtactgtcttaagttacctctgggaaaagaaaatatatccaaataaaagacctagaaggagacagtaatcttccctaggtttgcatttgtttactctatttttccccaggactgtcttctatagaatttaaaagaattctctgttaggcaacatcatgccatttggagctattacagtctctgactgctacctttgtcttgcagggtgaaagttaagagcatttctaagtttgatttactgattctgtgtatcttatgggatgcattgtgttcagtcactggggaaaatgttaaagtgataacaattattatgaaagtattgtattctaggcaaatagcatgccgcttctgtaattcactgtgacttttgattcctgttgttacctggtatctgttatttctcctgagcttcctattcagggaatgcatgcaaaccatttagcaccatgcagagccggagagatggaatgctgtatctccttcgaatagctattaagaaaactgcagagtattcaagaaaggatagatagcagatagaccaaatggtttgtactgtgtccttgctgcatgaaacagttcatgtgtgtgtttaggagaggacaccatgctgctactaggtctgcggcccttctccactgggcctgtatctactcttatccttctaaagatcacagacactctacattttttccccattaggcttgacctctgctgcccttgttgcctctcagcaggtggctgcccaggcatctgcatctggaatgtttcctggacaaagaaggtaaatatcctctacatttttaattagttgtagatagaaatatcttaatggttgggaggaagcaagtacaggatttttagaccaaaaacttaactccttgggttttatatcattgtaatgaatgtgtttattatgccaatataagttgcttcacatgcaacttaaattccatgaacctcattctgtaagggttacatagattagtaattaactgattggttttttagacagttgaaattttcttgggttatccttacggcatttctaaaataattcaccatgactccctttgttttattatgtttaaagataaagtcgcaaatggagacatttattttcataatgctaaaggtaatgtttgttctttgatattttaaattattccctaagttttatgaaggaaaatgatttaaaggaattaaattattaatattataaaattaatatttttcacaatgtatatcattactttatgtttattcactttctctggaattgaagtccacatttgaatggaattaaaataagactatcggtcttatggttttctggtttacagtgccaaatgttgatagaggctgggcatgatggcccatgcctgtagtcccaccactttgggaggctcatgcaggtggatcacctgaggtcgggagttccagactagcctggccaacatggtgaaaccccatctctaataaaaatacaaaaattagctgggcgtggtggtgtgcgtctgtaattccagctactagggaggctgaggcatgagaattgctggaacccaggaggtggaggttgcagtaagctgagattgcaccattgcattccagcctaggtgatggagtgagactctgtctcaaaactaaaaaaaaaaaaactgttggccgggtgcggtggctcatgcctgtaatcccagcactttgggaggccgaggtgggcagatcacctgaggtcaggagcttgagaccagtctgaccaacatggagaaaccccctctctactaaaaacataaaattagccaggcatggtggcacatgcctataatcccagctactcgggaggctgaggcaggagaatcacttgaacccaggaggcagaggttgcggtgagccgagattgagccgtggcactctagcctgggcaacaagagcaaaactccgactcaaaaaacaaacaaacaaaatgttgatagaaccgtgtgctaaggtttgcttttcttttgcagagaataacaagattggacatgtacattgtcatgtgactggatcacatggggaagcgctttatacagacatcagttccatggtgttaatttgaaatgccttaatggcaggcaaaaaccagtcatttcatttttgtaaattacagattttatcacagagtaacaaatgttgctgtaattaaacttctgttttatatatatatacgtatacatatctgtatatatacatatatatatatataaatataaatatattctttactttttgtatcagtaaccaggctcgcacacacagggtctgctgccacgtcgcaaaccactcagtaaaggaaattaaaaatgtatttgtcatgttaaaaagtgttagccacaaaaggctacttactttcttttccttttcctttaaaattgtaaataaataatgttatgtatcagtgtgcctgaaccttgcatatccttcacatatttcccataagcccctcagaaaggctaactgtgatgatgacactttggtacaatttagatgtctatttggtggctcctgttaaagacgcaccagtgtaaaatgttcctgtagtcactgtttgtacttgtgtattgtggaaaaagtacttttggaaggcatggggttgccagtaccacaaaaactgtgttgtatataatgtaaagattaaaatggggaaataatgagcatctgtgaataatgaggtgtcattttttgataatcttgaatggcaaataacccaatagcctgcgtaccagagacatctgtgattgttctattacttgaatagttctacagtctttttttttttttttaatgtttacaattatccagttttagaagagagagactttaacgccattgcctggttacttgttttatgctgtaatctagtttattttatgtaaaatgtatattgaatgctttccttttttatacctgccttaaataatttggcaatcagaattaaaaagtttttttttttttaaataatggcttcttgtctgtctcatgttattttctacctggctgatagtcattctaattttcaaagaagggtttcttaatattattaatatccaatgcataagatacagtaaacagatattaacttttcttataggatacataggtataacaaccaaatagtgtgtttaattcggtgaatgtattcccatttacagggtatttaccctaaacatggagcacgatatcactagaaattagtagatacaggtttctatggtatggaatgatacttcaaagatgcaaatgttatgacatgtggataacaggaaaaatatgtaaaaagtcatttagtcagttagctgtcattacattgatttactagaatattttatgccaaattttaactgcctcttctctcccttctttgcttggaacaaacacttactgagtgcctgctttatcccaagcactgcactgggttctggcatattgcagtaaacaaagcagacacaaattcctgtcttcatggagctttcattttttggtgggtgggataaacatatcataaaatatctgaataatatatagagcatgttagatggttgataaatgcaatgaagagaaatgaagcatgggagtggggcatagtgaatgtgtgctggagtttgtaactgtaaacagagtggccactaaagagatgggggggatccatgcagacatctgggggaacaccactgcagtgacatggaagagcaagtaccgaagccccaaggtgggagtgtgctttgtatgtttggactggttgatttcagtgctccattccagctgtaagtttttattattttactataattgctaatgacagtgctaccacgtggtttactaaaaagttctttaagctgacggaatttgtcttggtataatttggttagttctacctagaggcctttgcatcagaaatgaatagaattttgcaatcaaaaagaaatgtttcccttgattttgaaagaccaccttagagtattgcctttgctgcttggcttacacatctagtctatgttcttaatagatttcagtaagaagatatttttctgttagttttcagtttttcttttgaatttcatccaagctgtcatttataaaaatatcgtttgtggtgtttaatcctgtacataagagtatttcacatatttttcatcatttttaagctatcaacgctttttcgtttttatacgacatcttgattatccttgaagacttgaggtaatttgtcttataccagttaagcaagtatgttttctctgttcagactatagttggcagggtatctgttggttgcctacatgctgatccagttcttaaccaaccccttaactgtcaaagcacagaagcagaactaaggtcaacttacatcttcactagctgaattttcatgttcttgttggtagctgggtgatactgtggattcctgatgattttcttgctcttaataatatatatggaagccaatcttacctttcagctgcaaaatgactagatgtatgtttattacatagcaggctttttaaaatcacttctaattaggtggttaagtaaacaggttataaatagctgcattggaccatgtttaactctgctcctgtaataaacaggaatgctgataaatacaaagagatatatgaccaaaagcacattgcaatttgaataggctcttcccctaggcttttactggaacattattcgtgactggtttacattaatcactaaatgaagttttgtttcttcctcttactgttacagtgttgtctttgctgatgacaacatgaattgccaaaggccagggcttatttatattacgtgtgccatttctctggctgagtatatagtcagtaccgagtggtaaattaaagattcccaaaagacaagtgtacttggctccattatattactatgatgaatctgccattaatacattctaattgttttacttttatagacataaaatcagtccccttagtgactaataatagggtttattgattttactaaacattactcattccaggcctgctcatatcagcttgtcctgaacatatgcaaaaagcctgcagtgctgacacagtgcaaattaacttcatggagaaatgggagtgaagagttgtttacagctgtggtccccttgaatacagaatattaaaaaccaggtaataggctccatacagaaccatttattcctagattacaatctcagatgactttttcatggaaacttgccattgctgttcagcccaggtcattaacacttgcagagtaaaacgtgtggccttatacattcacactggctgtgaccctgatttagtgtggtttcagcccaagggtctgtgagtaaccagaatgaatagctctgattgatgcaggataaaaacagcagtttaaatgataattactggtcatttcattccttccctgactctgaaagagacaagacaggcaaagccatttattattgtttttgtcactaaccacagtcatccattccctgctttttgcagtagcctgagtcataaatgttgtttactttcagttaactttagaagagaaaacaaagcaaggcccccagtctgacttttcatttttcttaacaaaatcactctttaaagcaaggggtgagttctcaaccttggcactattgacatatgggaccagataattctttgctgtgggggaactgttctgtgcattgtagtatatttagcagtactcctgacctctactctggagataccagtagcaacctccccaacaaattgtgacaaccaacaggtcgtatgaaatttagaactcatgcctagcccctgccccacaggtagagtgctgagttctatcgttctttgttgcttttggagataggaaagccatcgatgtttccttgtaactcgatgtaaacagaatggggatgctcatttgaccaatgtggataaagttggaccagacctctagctctttaaaaagaattggatgacccagattttaacataataattagtagttcttttaggttgaagatgaattcaattttaaaaccacatctgagggctggattcatttcacagcacgtcaattagcagtgctagcccactaaaaatacatattatttcttctggaatgaaggctgtcagtggaaaacctggaaaaaaatggataaatcttaattgagttgctgggattgaattcagattttcttcacacagggagaggcatttctttcatacacaggaacaaactttgagagattctcacatacactatacatttcagtgaagtttttttttttcacttagacatttgaaaataaaatgaaaggaaacatcaaaatctgcaatatggagaaagttaaagtatccagggctatcatgaacacaaggcatgataacacccatggacaagtctaggtttaggtctgatcagactggcctgacccttggccagctgttgtcatgttcctgtctacctggaatggcaagtagtacgatggaacaaagcttctttcctgtgtccataacggacgtggctaatcattgccgcattctctccacctgaatgtgtgtgagacctcataacaagtttctcagtgcagctttcccagtagtccctaaaaaacagaccaaagttgacacgcaacatgaaggctgtttgccacctctgcaagaaactaaactcttatgggactaaatcatgacccctataactttcaagggtgtcaccctcacaaccccccaatttcaggcaaggagacttaacatggcactattcctcctttcaactattggaaactttggaagttatttatttaccttcagtgttttaaagcactgatttcttcagtcagaaaagttggggaaccagaatcgttacttattgacccaactttctactgatttatggaggtgttatctttttctcttttactttcatgctatcatcacatctttggctctcctgccaccctcttataatgatctttgattagatagaatccatccaaataatccagtatcatctccttctctcaacgtcacctgattaacaattttagttccatctgcaatcttaattcccctttgccacgtaacaacagtttcacagattctggggattaggacatggacatctttgggggctaccactctacctgccacaccacccaacacaaatccctttctgcctgggcagtattaacacaataacaatagtataatagttctactgtataatatacaatattacaactggtataatgaccatcatcaaaattatagtatatttactttgcacttcacatgtaagaactcatttagttctcataatcacccaattactattcgcattttagagctggaaaaactgaggcatcaagctaaagtaatttgcccaagttcacaccactgtgtaagtgacaggaccataacccctatgttatactgcttcagagaagggataatacactccctagggaattgacaagattttcctttgctaaagtgcttattatttcagaggggaaaataatggtgtgtctctccaggctgctatgagacaaagcctctgtgcagcctgtgctggagccaggcatcaagcccttgttaaactccacattccaggcccaggatcctgagagcctagcggctcttcagtgcattgctggcagaggttgctgaaaaggttaccttttttttgttttctcattgtcatggcagcccttgcctctttcaatactctaccatatgtatctgatgactagaagctcagaatacaagagttgggcttcacgggaactggtgcttgggtgtcagaggctggtgggaaggctgatgcttttgtgattctggcagagactatcatgggctcctacaaagggtcattccaacgttctgacaaagggccccaaatttgtactttcaattatctacaaatgatgtcattctcactgtctcaggggatttttgaaaatattagaaagaaggatgctcaaacctcagctttaactctttaaataccctcccctaaccagatccttctccagtgtattttgtgtgtactgagggacaagggaatatgtgaaacatacttacttgcaagatgtaaacatttaaattataatttctgcaatgttatattgaaattgcttctttatttcgatatggtgagagcctcaaaaaatgaatgcctagatttttcttggcttctcagaggactttgctctaaatagtatgtgttggggcaaaatacagaaattgattgaaaaattcttcctaataagggtggcaggggccactgaatcaagacatcctggccccatttaatcactggaggtcactgaactataggtctgaaagagaaagtagttccatcttcctcaccactctccagagaaggtagtccagccacccaacctagaccagatcggaattttccagggtgggggaagtggggtggaatccctagcctagtagggatgacctttcagcgtaataaccatggagagggagactgtttctagcaaggctgctgtacagctggatgttttcagctgcctgtaacagaaaccatgactgaaactgccatcaactgcaaggaaatgtgttctctccccaatgctgagccaagagcagggtaatctccagacatcatcctgcatgctgctgactctgcttctctgtgatactctttgctcagtcttccttgggcttgtcccctgtgttatggccacatgagttccagatctctctctggagacatcaatgtccaggggagagaactgtgtcttcctgtgtctcttaggagggaagaaaccttcctcagatgcctctggcaggcatctctcccatatccttggccagaaccaggccacatggtgactcctgaaacattacaggaagagaatgggattgccatgagttcctcaggctaagaaggatgagaatctgcccctgagtcatgcatgggaggagtggctcatggcttagaactaggattctgttggggagaacgaagcgggggatgaatgttttgtctgaggcatgaaactttctttgaggccagtgaaacgtggtagaatctcttagtgtcctctgggttctcctgaggtgtgagtctgggatgggtgctggtgggaggcagacagttgtttacactccagcagaactcacagagaccctccgctgtaactgacttttccttagagaatctggtgattgggtagaattaggatagcgggcacagggctgcactgaacgcactgttccgaaggaacatgaagagattcagaaacctaccgtctttcttttctctctcttccatgacacagctgagtaagactctatgggtaggaggaaaggtgccactctcttccaccattccctagcacacacgcacacatgcatacacacacacacacacacacacacacacacacacacacactctgctcttcagaggttccccagaacttacagcctataagaaagaacagggacctaccttctcccccaaagcaagttctgcactctggacagaaaagaggaactcaggaccatttttactagaatttagacataattaggaggggtgggtggaggggtgaagggactggaatgttaggaagggcaagcgttgagccctggtataccaaaattggaaagagaaagaacaaattagcccactggcagagggagaatctcaccatatcaggaacaagggagattccttcaggagaaagagaaaccaggctttagcttggggtctctgacttagagttatcaacgttaggaaagggcgttgaccaagtctcagaaagccatctcactcttgctggaagggaaagaatgggtgggcaacccctagaacttccagctgggtgggggcataatcctctctgcctttggccctctctccactctcagcagagcagaatgtgtctggtagggaagaagataaaggactggcctcattttcctgcccctctaccaacctgaatttgtccctgattgggtgagtggtgggcgagtgacccacccagcagatctagtgactgcaaacccttggggtagggttaattccttcaaaagaaggaattttgaaagtgggtgagcaggtcatgagacagaattcattcaggaagtatttcctgagtacctgtgaggggcctaggtactgggtgcccaggtcctgtgtcctggggatagggtgcccaggccctgccctctcccacttatagacagagtggggcaccccctcccacctctggatgagcacatagatgtctccgtaaagctgagcaaagctgaactctgcagacctagtgctggccaagaaggtctgccatgaagacaagcactcactgtgagactctgcctcgaaagctcataaacctgggagcctgctgtgctcagcctcagaaacccccaggtgcccgtgtgtctgccatccccagcccccaccatcccctcagtgataagatactgggaggcagaccataaaaggtggattttgtgacaacagctcggtgaccagaccgttccctctgctgagggctgctgagggctgaagcagggatgactcatggagaggccccagcagacagccgaggaagcctctgaccctgcggtgctgtgggctgggccatcacgggacactggggagccacagatgtgctcagaggtagggatatgcggtgagtcactccacccctgtcaggcactggcaggggagctgaggagtcagaagcagagagagccagcgccgagctcgcccggtgcctgtgagcagccagcctctaaatggcttccagcttgacagtcctcacactgtggcaatgtagcttctggaagcctatggggcccagggacattcctctgactgactccagtggatgaggtgtgctcagggtgtggtgggtgagcaagtggccttcccgggtcagctagagggactcccttgtcatcgtccagtggtggaaattgatgaattggcacctaacatgaatgcgatatcctcctgggaggctgagaatctctaatcttgtcccactcgatgtcagcaactccgcaggcctggaagcctccctctgaatgcttagcagggctcccctgtgtatctcctgctttccagggccactgtgccttggtcaaggatgtttaaggcgtaaatcacagaaatctattcaagcaaatgtaagcaaagtagacagatgtaagaacagaggggttcttacaggagcaagggtggcaagtgtgtccaagcttcctaggggctggcactggtgggacctgggaggtctaggcaccatggaagcttctctctcacacacatcgtggcttgttttgtcgctgttactcctcctctgcctcattcctctctctgcacactggctctctctgattctccaaacacatgacctcgcctgactggcaatactctctgtcatcttccagttctaattgcagattctcaagagaaaggatggaagtggccaggcccaggggccacaggatagaatgaacttgctgagggagtggaggctgggcagtgtggggcgggaacagttgctaagctggctcctatttttggcttcttttgactccccacaccactttcatctaagccctttgtcgaaggaatatttatgactaggagcagaagttcacgcaaaccagcttagttacaaagaaggtttattgaaagcgtataagaatccgtctcactatccaaggataggaagggaattggcaggtcatagtggttgttggtgtctagaaaatccctaaatctcgctcaaatatcacataatctcttaccccttcttctcttggtgtctctgtcccgttctcccgcttctgcagacagaccgtttctacctctttgtgacttccctattcttgtaattgaacgtggcctgaaattgctatggagctcacaagggctcgtttctcaccatcatttaactgacctagcctttcagtttgcactccaaattcctgtgccaagtgcagtggatttccatccaaggaataaccaaatgtggctgggccggatttgggagaggcgtatggaattatataggactgtcaacactcctgtgattccaagggttttaggagctctgtgccagcaattgtggggtggcaaag

SEQ ID NO: 87 - DNA, 2159 bp, Homo sapiens
gtcctttcttcttattctttcttccctttcactaatttatcccgatgttagcacattctgtctcgttactagcggacgcctgtaggtttgctacatgggatcattactgatcacggtgactctgaagtctggaactgaaggcggaatgagaagttgggaaaacttttttctctaaactctctgttttttaaaaaactattattctcgatgcttgttaagaggaaaaaaaaacctttggtgcttctgttgtgaatgtgaaacattattttccagctgtacagtgacacattttttttaaggagaaaaggactgattcgtttgccaaaaggggggtggggaggtggaataatgttatcgagtgattattctggctgagatgtgttatttggtttcttccttcttgatcatttggtgtttaagtaaaatgaggcacaggcttgtttgccgagtggagtgggaaaggcattttgatttgctggcctaattaaaaaatgataaaggattaaaaggaaaaggtggacctggactgagggtgtaaaatccctggacacattcgtggggcaggaaaaagaagaggaagattagaagattttttttttctttgagagaaagcccagcggagataaacgaatgtcccctcatctccaaagaaaagttcatcggatttttattctagagagctcatcttcaggatgtcagtgaacatttctactgcaggaaaaggtgtggatccaaatacagttgatacttatgacagtggcgatgattgggaaatcggggttggaaatttaataattgatttggacgctgatttggagaaggacagacagaaatttgagatgaataattccaccaccaccactagtagcagcaactccaaggattgtggaggtccggcctccagtggggctggtgctaccgcagccttagctgatggcctaaaatttgcttctgttcaggcctctgctccccaggggaattcacacaaagagaccagcaaatcaaaagtgaaaaggagtaaaacttctaaggatgctaataaatctctgccttctgctgccttgtatgggattcccgagatcagcagcactggcaagaggcaggaagtccaagggcgccctggagaggcaactggcatgaattcagcgctgggtcaaagtgtgagcagcggcggcagcggcaacccaaacagcaatagtaccagcaccagcacctctgccgccaccgcgggggcaggctcctgtgggaaaagcaaagaggagaagccaggtaaaagccagagcagccgaggcgccaagcgggataaggatgcggggaaatccaggaaggacaagcacgacctgcttcagggccaccagaatggcagtggcagccaggccccttccggggggcacctctatggctttggggccaagagcaatggaggtggcgcgagccccttccactgcgggggcactgggagtggcagcgtcgccgctgcaggggaagttagcaaaagtgccccggattcagggctcatgggaaactctatgttggtaaagaaggaagaggaggaggaggagagccacaggcgaatcaagaaactgaaaactgagaaggttgaccccctgtttacagtgccagcgccaccaccgccgatttccagcagtctcacgcctcagattctaccctcctacttttccccatcttcatccaatattgcagcaccggttgaacagcttttggttcggactcgttctgtgggtgtcaatacatgtgaagttggagtagtgacagagccagagtgtcttgggccctgtgaacctgggaccagtgtgaatttggaagggatcgtgtggcatgaaacagaagaagactccaggtttcccttgagcctgtattgagacggtgaatttcgttctgagggttctgcgtgggccggcgtgttgtgtggagccgcgtggcgcggggagcgcagcacggtcacgcagaccgaagctttcactgcacggccggactcgttagtgcgaatgagcctgtgtcccgcgtgcaccgagggagccgagcagcgcaggcggccctctagccccgcacggccagcgcgccgtgggggatgcgtccctttgcctccgccacgctcacctctacccgaccgctgcctctgtgctccgggcggccgc

SEQ ID NO: 88 - protein, 392 aa, Homo sapiens
MSVNISTAGKGVDPNTVDTYDSGDDWEIGVGNLIIDLDADLEKDRQKFEMNNSTTTTSSSNSKDCGGPASSGAGATAADGLKFASVQASAPQGNSHKETSKSKVKRSKTSKDANKSLPSAALYGIPEISSTGKRQEVQGRPGEATGMNSALGQSVSSGGSGNPNSNSTSTSTSAATAGAGSCGKSKEEKPGKSQSSRGAKRDKDAGKSRKDKHDLLQGHQNGSGSQAPSGGHLYGFGAKSNGGGDFHCGGTGSGSVAAAGEVSKSAPDSGLMGNSMLVKKEEEEEESHRRIKKLKTEKVDPLFTVPAPPPPISSSLTPQILPSYFSPSSSNIAAPVEQLLVRTRSVGVNTCEVGVVTEPECLGPCEPGTSVNLEGIVWHETEEDSRFPLSLY

SEQ ID NO: 89 - DNA, 2176 bp, Homo sapiens
gtcctttcttcttattctttcttccctttcactaatttatcccgatgttagcacattctgtctcgttactagcggacgcctgtaggtttgctacatgggatcattactgatcacggtgactctgaagtctggaactgaaggcggaatgagaagttgggaaaacttttttctctaaactctctgttttttaaaaaactattattctcgatgcttgttaagaggaaaaaaaaacctttggtgcttctgttgtgaatgtgaaacattattttccagctgtacagtgacacattttttttaaggagaaaaggactgattcgtttgccaaaaggggggtggggaggtggaataatgttatcgagtgattattctggctgagatgtgttatttggtttcttccttcttgatcatttggtgtttaagtaaaatgaggcacaggcttgtttgccgagtggagtgggaaaggcattttgatttgctggcctaattaaaaaatgataaaggattaaaaggaaaaggtggacctggactgagggtgtaaaatccctggacacattcgtggggcaggaaaaagaagaggaagattagaagattttttttttctttgagagaaagcccagcggagataaacgaatgtcccctcatctccaaagaaaagttcatcggatttttattctagagagctcatcttcaggatgtcagtgaacatttctactgcaggaaaaggtgtggatccaaatacagttgatacttatgacagtggcgatgattgggaaatcggggttggaaatttaataattgatttggacgctgatttggagaaggacagacagaaatttgagatgaataattccaccaccaccactagtagcagcaactccaaggattgtggaggtccggcctccagtggggctggtgctaccgcagccttagctgatggcctaaaatttgcttctgttcaggcctctgctccccaggggaattcacacaaagagaccagcaaatcaaaagtgaaaaggagtaaaacttctaaggatgctaataaatctctgccttctgctgccttgtatgggattcccgagatcagcagcactggcaagaggcaggaagtccaagggcgccctggagaggcaactggcatgaattcagcgctgggtcaaagtgtgagcagcggcggcagcggcaacccaaacagcaatagtaccagcaccagcacctctgccgccaccgcgggggcaggctcctgtgggaaaagcaaagaggagaagccaggtaaaagccagagcagccgaggcgccaagcgggataaggatgcggggaaatccaggaaggacaagcacgacctgcttcagggccaccagaatggcagtggcagccaggccccttccggggggcacctctatggctttggggccaagagcaatggaggtggcgcgagccccttccactgcgggggcactgggagtggcagcgtcgccgctgcaggggaagttagcaaaagtgccccggattcagggctcatgggaaactctatgttggtaaagaaggaagaggaggaggaggagagccacaggcgaatcaagaaactgaaaactgagaaggttgaccccctgtttacagtgccagcgccaccaccgccgatttccagcagtctcacgcctcagattctaccctcctacttttccccatcttcatccaatattgcagcaccggttgaacagcttttggttcggactcgttctgtgggtgtcaatacatgtgaagttggagtagtgacagagccagagtgtcttgggccctgtgaacctgggaccagtgtgaatttggaagggatcgtgtggcatgaaacagaagaagtatttcagctagtacaagggaagtgcctattagaagcaatgggccgcttgaggacatggattgcatccagtagtggcgcattcaccaaaaggcagatgaaaataatctgtaccaacaaggatcacaacaggaaacatcatctgaattttccactattgacaatcttgactatctagcctgggatttgcattgccaagcaacacgttaaataattttgtatctctttgaaatcaatttctggtgatcacacatgcagattgaaaactatggctttaagatttacgttcagtgaataaaatttacgttccctgaaaggcaaaga

SEQ ID NO: 90 - protein, 441 aa, Homo sapiens
MSVNISTAGKGVDPNTVDTYDSGDDWEIGVGNLIIDLDADLEKDRQKFEMNNSTTTTSSSNSKDCGGPASSGAGATAADGLKFASVQASAPQGNSHKETSKSKVKRSKTSKDANKSLPSAALYGIPEISSTGKRQEVQGRPGEATGMNSALGQSVSSGGSGNPNSNSTSTSTSAATAGAGSCGKSKEEKPGKSQSSRGAKRDKDAGKSRKDKHDLLQGHQNGSGSQAPSGGHLYGFGAKSNGGGDFHCGGTGSGSVAAAGEVSKSAPDSGLMGNSMLVKKEEEEEESHRRIKKLKTEKVDPLFTVPAPPPPISSSLTPQILPSYFSPSSSNIAAPVEQLLVRTRSVGVNTCEVGVVTEPECLGPCEPGTSVNLEGIVWHETEEVFQLVQGKCLLEAMGRLRTWIASSSGAFTKRQMKIICTNKDHNRKHHLNFPLLTILTI

SEQ ID NO: 91 - DNA, 3255 bp, Homo sapiens
aaggacacccccaaattgtgctgctgaggatatcaaagccagcccttcctccaccaacaaaaggaaaaacaagcctccaatggagctggacctgaactccagctctgaggacaataagcctggaaagcgtgtccgcacaaattccagaagcactcccactacccctcaagggaaaccagagactacttttttggaccaaggctgctcttctccagtgttaatcgactgtccccacccaaactgcaacaaaaagtacaagcacattaacggcctgaggtaccaccaggctcatgcacacttagacccagaaaacaagctggagttcgagcctgacagtgaggacaagatctcggactgtgaggaaggattgagtaatgtggcacttgaatgcagtgagccaagcacaagtgtatctgcttatgaccagttgaaggcaccggcatcccctggtgctggaaacccacctgggaccccaaagggaaagagagagctgatgagcaatggcccaggttccattattggtgctaaagctgggaagaattctggcaaaaagaagggccttaacaatgaactgaacaaccttccagtaatctccaacatgacggctgcgttagacagttgctcggcagcagacggcagtttggctgctgagatgcctaaactggaagcagaaggattaattgacaagaaaaatttaggagataaagaaaagggcaaaaaagctaccaactgcaaaacggacaaaaacctctctaaactgaaaagtgcccggcccattgcccctgccccagcccccactcccccgcagctaatcgctatacccactgcaacctttacaacgaccaccactgggacaatacccggactgccctccctcacaacaactgttgttcaggctacaccaaagagtcctccgttaaaacccattcaaccaaagcccacaattatgggagagcccatcaccgtgaacccagctctggtgtcactcaaagacaaaaagaaaaaggagaagcgaaagctaaaggacaaagaagggaaagagacgggaagcccaaaaatggatgccaagctggggaaactagaggactccaagggggccagcaaagatttacctgggcattttttaaaggatcatctcaacaagaatgaagggctggcaaatggactgtcggagtctcaggagagccgcatggccagtatcaaagctgaggccgataaggtttacactttcacagacaacgctcccagcccttccatagggagcgcctcgaggctggaatgcagcactttggtgaacgggcaggcaccaatgggcacctctgcatgtgttgacccagaatggggcagagagttcagctgcaaagacaagcagcccggcctattcagacatatctgatgctgctgacgatggtggttctgacagcaggtcggagggtatgagatcaaaggccagttccccatcagatattatttctagtaaggacagtgttgtaaaagggcattcttcaactacagcacaatcatctcaactgaaagagtcccattctccctattaccacagctatgatccttattattctccaagttacatgcaccctgggcaggtcggtgcccctgcagctggaaatagtgggagcacgcagggaatgaagatcaagaaggagtctgaggaagatgctgaaaagaaagacaaggcagagcagttagattctaagaaagtggaccacaattctgcatccttacagcctcagcaccagtcggtgatcacacaaagacatcctgccctggctcagtcactttattatggccagtatgcatatgggctctatatggaccagaagtctctgatggccaccagccctgcctatagacagcagtatgagaagtactatgaggaccagaggctggcagagcagaaaatggcccagactgggagaggagactgtgaaaggaaaagtgagctccccttgaaagagctgggcaaggaggaaactaaacagaaaaatatgccatcggccacaatctcaaaagctccctctactccggagcctaacaaaaaccattctaaactagggccatcagtgcctaataaaactgaggagacaggtaaatcgcagcttctctccaatcaccagcagcagcttcaggccgacagcttcaaagctaagcagatggaaaaccaccagcttattaaggaggctgtagaaatgaagtctgtcatggactctatgaagcagacaggtgtagacccaacctcgagatttaaacaagacccagattcaagaacatggcatcattatgtataccagcccaaatatctggatcagcaaaagtcagaagaacttgatagagagaagaaattaaaagaggatagtccgaggaaaactcctaataaagagagtggtgtgcccagccttcctgtatcgttaacaagcattaaagaggagcccaaagaggccaagcatcctgattctcaatcaatggaggagagcaagctgaaaaatgatgatcgaaagactcctgtgaactggaaggactctcggggaacaagagtggctgtctcctcacccatgagtcagcatcagtcatacatacagtacttgcatgcttatccttacccacagatgtacgaccccagccatcctgcataccgggctgtttctcccgtcctaatgcacagttatcctggggcatatctctctccaggatttcattatcctgtttatgggaagatgtcagggagagaagagacagagaaagtcaataccagccctagcgtcaacacgaaaacaaccactgaatctaaagcactggatttgctccagcagcatgctaaccaataccgcagcaagtctcctgctcctgtggaaaaggctacagctgagcgggaacgggaggcagaaagggaaagggatcgccactcccccttcggccagcggcacctgcacacgcaccaccacacccacgttggcatgggttacccgctaatcccgggtcaatatgacccttttcaaggcttgacctctgctgcccttgttgcctctcagcaggtggctgcccaggcatctgcatctggaatgtttcctggacaaagaagagaataacaagattggacatgtacattgtcatgtgactggatcacatggggaagcgctttatacagacatcagttccatggtgttaatttgaaatgccttaatggcaggcaaaaaccagtcatttcatttttgtaaattacagattttatcacagagt

SEQ ID NO: 92 - protein, 354 aa, Homo sapiens
KLEFEPDSEDKISDCEEGLSNVECSEPSTSVSAYDQLKAPDGAGNPPGTPKGKRELMSNGPGSIIGAKAGKNSGKKKQNELNNLPVISNMTAALDSCSAADGSLAAEMPKLEAEGLIDKKNLGDKEKGKKATNCKTDKNLSKLKSARPIAPAPAPTPPQLIAIPTATFTTTTTGTIPGLPSLTTTVVQATPKSPPLKPIQPKPTIMGEPITVNPALVSLKDKKKKEKRKLKDKEGKETGSPKMDAKLGKLEDSKGASKDLPGHFLKDHLNKNEGLANGLSESQESRMASIKAEADKVYTFTDNAPSPSIGSASRLECSTLVNGQAPMGTSACVDPEWGREFSCKDKQPGLFRHI

SEQ ID NO: 93 - DNA, 26563 bp, Mus musculus
gcaggactggtgccctgggtgtgtgagtctttaacaaggaggaaggtctgacgcctgagtctgggaaacctctgcctcctgagggcttaatgacatcctgaaggaaccagagcaggttgtggtaactctgggagggaacgggaaggacataggctcaagaggggctttcaggtcaggacgtgctcacagtgtatgtccatttgcagcccagactcctgggtcagcatctgtcagtcccagggccactcagacctcccaggacctctgatgtccacatgaagaggggacactgtaagtgaaacctccttgcctggcacctggaaggtactgtgagaaatctagtagagcaggtgttgggttcagggtggaagctgagaaaactcatttcagagacaaagcttaaacatgaagctttattttctgagtgctcaggaatgggaatacaaaccagctgttgcattgaccaatcgtattttgacacaaggagttaagcaaggaagttgacattggtgattgggctgggcgtggtggcgcacgcctttaattccagcacttggaaggcagaggcaggtgaatttctgagtttgaggccagcctggtctacagagtgagttccaggacagccagggctacacagagaaactctgtctcaaaaaatcaaaacaaaacaaaacaaaatacacattggtgaccttattctggtcccgtggtttcaaggtcctaagtcagcttttgcagtcaggtcccctcttagatgctggcctggaattttagactaataagggaacaagagaggctgctcatagtcttttttttttttttttttttttagatttatttatttatttattttgtgtatgtgagtacaatgtagctgtacagatggttgtgagccttcatgtggttgttggaaattgaattttaggacctctgctcactctgatcaaccccactcactcagtccctgcttgctccggcccaaagatttatttattattatacataagtacactgtagttgacttcagactcaccagaagagggcatcagatctcattatgggtggttgtgagccaccatgtggttgctgggacttgaactcaagaccttcagaagagcagttagtactcttacccactgagccatctcgccagcccctgcacatagtcttaagtcaaggcaggcagcacatttatgacttgtgtgccttagttagataacgggataactgcatcttccctctttacatccttcactggttaacagacagacacaagaaaggcctgttctaggcctggggacagttctgaccctgccagcaagggggagtttcttcctgaggagctggactcaggaaactgtctccttacccaggcgttaggatcaagtgaggcctaggttcaaatcctagctctgacactctctagctgtgtgagcttgggccaactgcctgctttttccgtgtctcctggtttgttcctcggtgggacacaggtgataaaaagtttacccagttcgcagggctgtgtgaggatgaagtgagacagctgataacctagcgagcaggtattcagtaaatgtgagcttttaaagtactactgcttctgtgtgggtgggtgagtgcatgtgtgtgtgcactcgtgtgcatgtgtgaacacttgacgtctgtgttggtatgcttgcaagtgtatgtgtgtgtacttgtgagtgaggtacctgtgagtgtatgtgagtgtacctgtgaggtcagaggacagcctccagtcttgttcttaggcaccatcctttgtgtgtgtgtgtgtgcatgtgtgtatatatgtatttttgacaggctctctcactggcttggaacttactaagtagactggctgtctgataaaccccaggaatccacatgtttctgcttctccagtgttaatagtccaagcaggcactactactatgtgcttgttttgtgtgtgtgtgtgtgtgtgtgtgtgtgtgtgtgtgtgtgtgtgtgtttcttttaaacataggttttggagattgagctcagggcccagtgcttgcaaaacaatggctctgttgaccgagctatctccccagctggtattattgcttctggatgttagcttggtgtgaagggttcctgcctcttgcaaggcctcctaatagtttgtgctaatggtctgtcttaagaaaggtagagagggctaaggagatggctcggtggttaaaaacactcactgctcttccagaggtcctgagttcaattcccagcagccacatgatggctcacaaccatctgtaatgggatccaatgctctcttctggtgtgtctggtatgtctggtgtgtccggagtacagctacagtgtagtcacataaataaaataaataagtcttaaaaaagaaataaagagagaaagaaaggttggtaacataaacagacatggtgtctgaatccttgcctcccacgtgcccaggaagaagggatacagcttatactgaatggcagctgtgagcattaccttataggcagctgggcccatcgaaaacgtcagaggaggaaaacaaggggagcttggcaatgcagatttttgtccttatagaaatggaatctaagtgtacttacagtataatctgagtccagtgatgtcatcatcacagcagtggaattgtgggagagcctctcctacgctaggcactgtgctaagagcggcacaaaccttgcccgtagtcaccacaccgcaaccttagttaataggttttgtttgtttttactttataaattaggaaacttccggcacaggagtgtttaacttcggtaaaatgtacacagcccccaagtagaagagtgggattagaatatgggcaagctggctttagacagttaacgaggacattctgtgatgtgtgggtctgtgcatatggaggtcagaggtcagcattagacatttggatcacctactttctacctgacttttcgacgcaaggtctctcactgaacctggagctgcttgccagttcagccacactggctggccggtgagaccgagttcctcctgtctctgtcttgctagcatcatgatcacatgggtgtgccgtaacaccagttttcatttttaaaaactatttaatttttttctctcttttaagcgggttattgtctagtaaactcaggtcctcgtgttttatagagtgaaccatcttccctgactgacattcttctttacttttctgaaaccatgaagcccttactttatatcaaggtgctagctagagttcccttggggactgggggactagaggacagcctgtcaacctctcttttgggggagacttccatttgtcttgataatctccctctgtttttctgggattttacctttttctttgagagcgagagaaggggttgggtggggaaacaaatagaagaaaaacttggctgaccataggggatggtggcttccagacatcaaagtgggcagcagagccccggatggatgggctggaagcaggcctctgtccccttaggctttccttcggaaactggcagaggccctggcgggaacttctaagagccaagagaacaagtcttttcatgtggcctccctttgagctggcttctgggtggggttggggtcggtgggtagagggtggggagtgtgtggagaggtgaggccacagtcaggttgggaaaacagattgggcagcggctgtgagcacagggcctccattgtgcagctggctcttgctttcaataactggctctgaagaaggtttcattgaatgccagagaaaggagccattgaaatgcctggggctgggactccatgaagggttaaagacaggggctaagtcactgtggctctgttgctcctggcttaggtagatgtcccacacagggtccctatgcactgagaccaggactcagagagaaggatgcaaagatcaagctaatgggtacccccatgtaaagtagggaaacccccttttttccatgaaccacattgtccaagtaatatttaataagtaacaggcctccaagatgccctgtgggcctgccttccggggacagtgacctatgaacaggcctgtctcttcaggacttcttaagagtgctctccgggtgctccaccactctctcagtggcacagccagcatgacattgttaagccactttctaatgatcattaactattgtaattctcactgttcccccaaagagtgtgggtagactggtaagaacagctgtcactaaaacaggtgactgaggaaacctggaaactctctttggagggactttctccaaaaggactagctggttaggaggtcatggttgggctgtcagggggcaccagaagtggggtgcggtacccttatactcaggaccacatgctttgtttccagcaatggaggactgtgcggaccgagatatgtatacctatgaaattgaggtacctgtgtggatgctacaaagaacaggcagaaggtagtgacatgatctgctgctgagacgggcacacacaacgaacctccagtgccacagtggtgtggctccttggttgtcacagaactctgggaagactttactgtctccagaagtcaagtcggcaggaaggatgtcctgggcctgaaaggagctggcactctttactttagatcaaccattccggataaaaacattaaaaaaacagaaaggggctgaggaggtatcttggttggtaaagtccttgccacgtacatatgaaggtctgaattgaatcctcagaatccgtattaaaaatgtggacagggtggtatactggtgatttgctaggaggcagcgtcagcaggatccccgaggctcactggtcagccagcctagtgttttaaaaagacaaggctgatagtgttctgaggaaggatactctgacctttgaagacatggacacacagacacatagacacacacatatataccacatacacacagagacatacccaccacatacacacaaagacacagagagacacacacacacagacacacacagagagacactcacactcacacatacacatacacgtacacaccatacacacacatatacacaccacacatacaacacatacataaacacacacacacacacacacacacacacacacacacacacacacacagaggcatttcttgtcttataaacagtctctctagtaggttttaattaatccgtcacttcctgtgttctgggtggtgactaggtgaaggccttggatctgttctggagatatagctctttgctatagcaccacaggctctcagaattcacccgcctgattttgtttattcttgttatttctctctaatgcgtctctgtgtgcctacgttactataaaatgagcagtcgcctccagctacctttatatatgtcctctgagatgtgtctgatactcttggaatgggaataacatgatttccttgtaagaattgtgtctaaagtgagaggcagaaagcttagagtaaggaaggcttaagaggcccccttccgggctggtgagatggctcagtgggtaagagcacccgactgctctgagcacccgactgctcttccaaaggtcccgagttcaaatcccagcaaccacatggtggctcacaaccatccgtaacgagatctgactccctcttctgaagacagctacagtgtacttacacataataaataaataaatcttaaaaaaaaaaagaggcccccttcctacataaggggttgaactctgtgatatttctgacgatcagaggcctgctgtaaatcttgcaaatctctgatatagtccagcctagacaaatgcccttcagtgagatgtcagcacacatagtcagtatatagggtctttgccaaggactgtaaccagaaggatctatttagctatatataaaataagataaatttagttaaaagatgactaaatatacatatacatatatctactcacatgcacagatatatcaatggacagagtcacagaatagactcacccagtttttcactttaatatctctgcaccctaaaaagctgtctttgggacaaatgactagaataatgccacttttaagttggagaaacctttccaagtcttctcgtattgccttctcttttggttcaggaatctcacctctacacagctgggcatcttactcctttcttgcttagatctgggaatggggaactcacttttttttttttcctgagtctaacttcatgggtggaagtgaaatctgtgacagctaggaagtaacagagctacacccctgccatgtctgatctgcatgtcgtgggaagatgttaagtttcttgcagtgttttgatgtggatgtcttgtggggggtaagggataggaacacacgtatgcgaatgggaagcagatagtgagatgggggcatccgtgagagcatcatctaggaagcagctaggtctgaaggcagcgggatgctccacgtctggattgatttggccagagagtggccctgagcttgagataccttggtaggtattctgggtgtgtgtgtgtgtgtgtgtgtatgtgtgtgtgtgtgtatttgtgtgtgtgtgtatgtgtgtgtgtgtatgtgtgtgtgtctgtatttgtgtgtgtatgtgtgtgtgtgtgtgtgtgtgtatgtgtgtgtgtgtgtgtatgtgtgtgtgtgtgtgtgtgtgcgtgtgcgtgtgcgtgtgcgtgtgtgtgtgtgtgtgtgttgggagtgggggtgaggtggggagtgctgatgaactttgtcccaggaaagagggcaagtaccctgggaaagacacacaagcacaagaagataactggctcaatgtgtaagccacatgacctggatccacattacactgtttatttccaccctgtggtttcggagcctttggaaatgtctgctccaaatgttccagcccggcagctataatggtatttaagatggagtcctgggtctgcgtttatttccctagagcattggtggggacaatgacttctgaggtacgctaggtttctactctaggtttgggggttaccaaaagactgcattcaagtgttgggaaagaagggctgggctccaggagtgcgtctcctgcttctcttcccaggacattcatccactgttgactgtccttttgttaaggaagctgtcagagtgtttataaaagaaatcccttcaactggcctggaatctgcctcctagtgactctaacccacaagactcagttctcaaaagcagggagcagaacaatgggccatctgcagctgctgagtgctgactctgagcaggacacgtcacagagcgtgatagtgtctctcgtttgtgtgattatatcatttcacagatggagaaattgactgggagaacaataacacaacttgccaaggccagacccccaaataagtagcaggatttgaactcagacagtctgacgtcagagccttgtcctcaaaatactgtctgtgtacgacagcccccgtggggttgtgcagcctgggacccctatccttttaggcctctgggggaggggccagactaaaattgcagcctgttcaccttgccatctctcttggtgtatgaataaggggaaggtcacattggccaatagtctgggacaaacttaagagactgaaaagccctcatccttgtgacctctagtgactcaccttgtcacccaggacaaccttgctgtagcctccggaagcaccgttttagcaacggctccctggggaggctgtgcttttcctgtctgtcctcagcatcttttgccagaacaacaggctgctttcccttttgataagtctggtcaccctaaatatggggcttggagcaaacgggagcactggccccacgcagccctcatttccaaatgcagattcggactgtgctgctattctgatttccttccacacacagtggttttcagtaggagaggagggatcttggcaggagaaaggtgctaggagggaagacatacctgggagtttttgtttctaagacactggcctttaagactatggatccctcgcacagtggtctcacaacaaagggaagtttggcatcgctaatcccttttgttggctagcagtgtccacgctaaacatcgaagttctaagagcaaggtggctcggcaggtaaagccaaagcttacaggcctgggtttcactccctcaagctgtcttctgatctccacacacaggtcccggcagtctcaaccccacccatatacacacatagaaaactaactaactaagcaaataaatacagattaataaaaagattggaacttatgcagagccacatcagttcccgcccctccaaaccctcaactgcgcaaaggtcagtaccactgcttatgtccaaaaagacagcctgtggtcacttcaggctggatgctgacagggaaaatagaaggttgactgacagagagaaaaccccacttacagcattcctcagaaacctgtgaaatgggtttccatctgacaggaaaaaccacttccgcctcctggggcagtgaagaatgaggtattgggttctctattggcatatactacatgacatcgaagcccacactaaccgccaggctcctgttaacatatacctgtggtgcccatcaaggccactggctgttctgggccacaagcccccttcctggcttttcttgctattcttccactatgctaactcctgggctgctccatgctacaggtttctcttctgacccagcaggttccctttataacaagtatggcttctctcggccacactgatagccctggcagtcaccagtgtacctctccgcctcgaaccccaggtagccttgacggctttgggctccccccaaatgcctctggctattctttttctaccacctgtgagagaaccactcagcagttttatatttacaataaacccttctttacatccgtggagtcgtccagttcagtggcttcatgggtccctcgcacttactggtcaaagttgcccatgggcacttggtggctagatctagtcctcggctaggtttgctgtggcccacacagtgcttaaattagttagaaacacttaacaatgggaagagccgcccctgtatcaccataacgtttgacttgaatgtccctgtttatcttcttggaggggagttggcccaggtggttgcaggagcccattaacttactcatccattgcattcattcaagcaacagggttgagaacagacagtgttaagctcttcttaaccctggagggatcctgtggatataagatgtatacaacacttttgccatctagaccagccatgcactcttagcaccttataaccagctaagaagtggtgtgaggaaggtaagatgtggaaggaagagaagctggcagagtcaggaggaagctgccgttccagcagtccattggctctgtgatttagcagagctagttcctggtcatcccaggaccttggtctctccatctctagaaatgacccagttggctcggaaaatgaactggacttttctagggctggcattcatatactaagactccatgatctaggaatgcctggccgaactattccggaattgttccactgaattccaagcaatccccctcccttctctggagtccgggccaggagcaggccttagaactagcggccacagcgggtctgggctgcctgcccgggggcgggacctttttcgggcgtcccacccctccacctgggttctcagcccggcagatgttacaactttttctcccgctcttgggctgtgtcccttcccagacccgcccagcccgtgtctccctccccttccccctgtggggtcctgcccacctcccagcctggagcactgctttgcggggataccgggcggggtcagaagctcagctaggggaattgggggtcgggggagggaggagaaatggaaagcagaagcgagagaaattaagaggcgggagggatcggggtaaaagggaagcggagagtccggggatggtggagagcacttttgggaagcctccactccacgactcaggctggcccgtcagagctgggggagagggctgcgggaggaggctcggcgggagcctgaccttccgggagcgccctgctgcctgtccgagggtcctggaccagagccccgagggctctgactgcatccaggcgggcgggagagcaggcgttgcgcccctagcgcggcaggctctgaggtcctgggaaccccgctcgcccagaccggcgtcgcaatgcatgctctctcaggattctccctggtcagcctactcagcttgggctacctgtcctgggattgggctaagcccggccttgtggctgatgggcctgccgaggctggcgatcagccttcggtggctccaccgcagcctccacacattatcttcatcctcaccgacgaccaagggtaccacgacgtgggataccatggctcggatatcgagaccccaacgctggaccggctagcagctgagggcgtcaaactggagaattattacatccagcccatatgtacaccttcgaggagtcaactcctcaccggcaggtaggcatggcccattcccgagggactgggtgtccaaacccccagcacacccagttggtaggttgcaaaccccgcagaatagctctgtgcacggacctgagaaacacgtgttacgagccagctttgcctgcaacatctgttagctcatccataagtcccttgccctttttggacctctgtttccccaactctcatagttcaaggcttctgattatcttcgagaccttctctgtggtccacagttggttcctttgtttaatcagaagaatctttgactcttattttgaattctgtgcatattgacagatatggagtcagttcaaaagtcacttgactctcagtttcctggtccataaaaatggactgagggagagtttctatcctgaggaggaatagtgaaaggtggaggaattaggtgtaacttgccaggcattcaataaatgacagtctctgtctgtattactggagagatttgggtcctgtgccgttgatggcaccattgggagaagaccaaggaactggtaagatgcagagacctgtagcctgaggctggttgcttcccttttccaagtctccaagttttctcatctgaagaatccccccaaattgtgtgaagagaagggagggctggggattaccagagaaaagatgctgggaaaccaaagggggttgtggcaggcaaactccctttgcttaggagacaatccctgggttgggctgaagctaatcctctttggaaggaggccatcgcctgctttgggatcactagcgagatctcgggaccatgggccacctctctccgtttcctgggtgggacaatgaggcatggaattaaggagaggccagcttgatgtttctgcccaacttcaaagtcttgtgaaagagagggttatgaagtcagaccctggactggtggcttggagctcgaaaccaaactgtggtgtccttttctctttccacctgcattccgtctgccttttagatccagggatcgtgaagaagagcagggagagggagacaggtgggaggtttgtgttgcagaggtggctcagtagtggcagcagaccttggcatgggacagcgaagaggcaggacaatctgcatttcgagtttcccagttgatgtttctctccccaggtcgacgtgacattggttaactgccgagtggacagttagtgcagcactccaggctcttactggtgaagttagtggagcattacagagccagccgtgtctgccctccaccctcggcagctacctctgtctcacggatgctcgctccacggcttggtagcttggtggcatttgcttatgcagccagtcctgtttggtgtagctgggaagagccaaagtgtcttatgttactcactgacaaatggactttggcaaggcttagcgggcccacccacattacagaatcagtgtttcagaggcaccccacccttatgtggagacactcagctgggatactgggcccctaggatgcttctcctgtcacttccaatcatctctcagcttgccctgggtccaaaacagttctactgttggccagctgtctggctttgggtcccactgctacactttgggggcttcagtttcaatatttgtagaatggagttgatgataatgtttcatacgtattttacaagagaggtttaggttggtgaaatgtctcagcaggtacaagtacttccagtgtaggcctggttactgagctcagttcctggaacccactatggacagagctgactccagaaagcggccctctgactgactgtgtatgccttggcgtgagtaggcccaaactcatccactcgtaagacatgcgcgcgcacacacacattattaataatagctaataaataaataaataaataaataaataaataaataaaattaaaaaacaaaacaaaacaaaaaagaggcctggtagtgcaggcaggtctgtaatccctgtaaactatttaggaagctgatacagtgctggcttgggcttgcttgagttcgttcaggatgagcttggtcaacttgaagttctgtgtcaagataaaaagtaaaaaaaaaaatgctgggggcataatataactaggtggtagagtgcttctagagcatgctcaaggctggaagttcaaaacaaattcacacacactcacacatatacacacacactcacacacattcacacacacacacacactctcacacacactaacacacacacacacacacacacacacacacactcatggggtacagggagaattgaatgagctaatgcttaaatgtggctcgaagtcttaagaatggccttaagataaggaagcagtctggtgtcaaataccaggctaactcagctgcctaagggaaaggacaggtgtgaaattctaactcccctgtgacatcccaggtggctttacttgcaactcttaaagacatctcaaacagatcacgtgggtcatgcagatctcagcagcaaaagatgtggtacaaatatataaaggaagctcaggaactggcaaggcattgactgctgcataggcctggggggatggggcggagggcttgagggcttgagctcacagcaggtggggaatgtggggtgggggccgctggtctgataaagcccaggagcagggcacctctcagggatttcccgttccagccagctcactcacacctgcaaacgtcaaccagccccatatgggaggaggtgggcagtctacttttgaaaacactgctgcttggactgtttggtttcatgttcaagtctcagagctgcccttgactgctgagtgaccttgagcaaagcccctctgccctctgccctctgttgatgttttttttttttttctttttaaagtagatgaaaaaatctaaaagaggatttgggtcacttctggcttccaaaccctctgaattcattcattcgttcgtcgattcatttgttagtttgttcactctattagtaactgagggagctttaaataccactgaggtgtgaggaatacaaagacaatcccattctattatcaccgggctcaagaagacagttgtaatcctagggccaagtcgaccatgaaggtatgcaccaagtcgaccatgaaggtatgcaccaagtccctgctgcagggaagaggacccagaaacaatgtaactcactctctgggtgagctatgagagactatattggggtgggcttccaaggagtgggagtttgcctgggagacgagacttggtgtacccaggttctgtgctaagtttacagcttagagctcaaggactcactcaggtctggagcctgcctgtgctgggatgcagaacccactcttcctactagccatgtgagtcaccaccaagctcatacggttccttatttgggaggcaggaataataacatgcacttcctagtttgcagtgaggatttgagccaattcaaagggagcgtgatgccgaacatacagcaagagcttggtgttagctcttactgatgtcgtgcccaagcctgcctccactcttcatgcaccagcttcctggctatctggtcctgggcagtgaacgtaactgttctgagttattgcatctcatcaataagttggcatacatacctgccttggctgatgtgccggtttgagataaagtagtgtaggtgcttagacctttggtggtatctgttgctttcgttcctgttcaggctggtggcataggaccagcattcatctcagggtgcaactaggggttgctgattgggaacagtggtttggatgtagctcacctttgtttcccatatatcaatctctcacccacaggtaccagatccatacaggattgcagcactccattatccgcccacggcagcccaactgtctgcccctggaccaggtgacgctgccccagaagctacaggaggcaggctactccacccacatggtgggcaagtggcatctgggcttctaccggaaggagtgcttgcctacccgccggggcttcgacaccttcctgggttccctcacaggcaatgtggattactacacctacgacaactgtgatggcccaggggtttgtgggtttgacctgcacgagggtgagagcgtggcctgggggctcagcggccagtactccactatgctctacgctcagcgtgcaagccacatcctggccagccacaatccccagaatcccctctttctctatgtggccttccaggcagtacacacgcccctacagtcacctcgagaatacctataccgctaccgcacgatgggcaacgtagcacggcgcaagtacgcagccatggtgacctgcatggacgaggctgtgcgtaacatcacctgggccctcaagcgctatggtttctataacaacagtgtcattatcttctccagtgacaatggtggccagaccttctcagggggtagcaactggccccttcgaggacgcaagggtacttactgggaaggtggtgtgaggggcctgggttttgtccacagcccactgctcaagaaaaagagacggaccagtcgggccctggtccatatcacagactggtacccaacactggtgggtctggcaggcggtactacatcagcagctgatgggctggatggctatgatgtatggccagccattagtgagggccgggcctcaccacgcacagagatcctacacaacatcgaccccctctacaaccatgcccggcatggatccttggagggtggctttgggatctggaatacagcagtgcaggctgctatccgagttggggagtggaagctgctcactggagacccaggctatggtgactggattccacctcagacactggcctccttccctggcagctggtggaacctggagcggatggccagcatccgccaggctgtgtggctctttaacatcagtgctgacccttacgaacgagaggacctggctggccagcgacccgatgtagtccgcacccttctggctcgcctggctgattataaccgtactgccatccccgtgcgttacccagctgcgaaccctcgggcccatcctgactttaatgggggtgcttgggggccctgggccagtgaggaggaggaagaggaggaggaggaagaggaggaaggcagagctagaagtttctcccggggtcgccgcaagaagaaatgcaagatttgcaagcttcgatcttttttccgtaaactcaataccaggctgatgtcccaccggatctgatggcttagggtggcagggaatctcagttcccctcagacactctccctttgctggttctcagggaggaggcaaggtcaagtcttcatctgtaggcacgtggagggagggcacagaagccctcagctgaatagggtgggacttggggaagggcagcaaccaggctgggttgcctgggtcacaatcctgcctctttcctgatgagtttcctttttgccctcaggttacctatagcagcattctgcctcaatctcacccctaagatgagctctggtgactttaggactccagtgtacacatgtgtctggggccatggcagggtttcttgctgaccttgtcaccttccagacaacttgagtccatgaccctctttccagctctctgtggtgctcttggatatcagctggagtatggccagctggctgctgctctgttgaacaactcaatgagagaacggacagggtaggctctgagaaatctttacgttcctggagcctcatgacttgggagcctagtggaattcttctcttttggtccccaacatctggggggagggggaactggctgagcctgagccactgtatagtgagggtgggggaaacagctgtgaaaggagcctttgatttggtcttgaacacagttcttccccacagggccttgatttccctacttgcaaaggagtagggaaatatgagccttggctctgcctacctcacgttgctggtgctgtagaaaactggccaggctgatggttgtggaggagcctgtgaacttgattaaagtgccattatccagaggcaagagatgctggtctgtgtgtgtgtgagtgtgtgtgtgtgtgtgtgtgtgtgtgtgtgtgtgtgtcttggagacctgtgtgagctcgatgctagcagaggggacagaaggtaggtgggaaggaatgaaggaatgaaggaaggaaagaaggaaggttgaaaggaagaaaggaaggaaggaaggaaggaaggaaggaaggaaggaaggaaggaaggaaggaaggaaggtcctgccacaggcttaccatgtagctgcaggcaaacccctgaccctctctgggcctaagtgtttctctacacacaatggatgattcaagagtccttacttttggtggttacaggcacccctgtgcacatttgcatctggggtgggggggacacaggcttggtagtgttgaggaggggggtggttgtagagcctgctagctgcacactgcgttctgcatatctcccttcaggtcccagtcggcgcagtgtgtgtaggcgaaggccctgctgtgaattttgaaaatagttatttttgtcactggcaaaggaggccctgttaggactcgtcagcttgtggatgagcgggatgggtggagtggggtgggtgcggtgccgccgtggggggttaccgctgcttgcagggctgcatcgcccaggcagtgactgaatcctgcatgagggcctggcctaggctgtggggaggagatgaccactgcgtcctagatctttccttagccctgtgcttcctttcttccttttttccttaagatttatttctaatgatgcgtaggttgtgtatttgtgtgtgggtatgtgcacttgaataaaggacccacagaggctatagacatcagatcctcctagagctggggttacagagggcgtgagttgtccaacatgggcaccggaaaataaacttatgtgctctacacgaccgagctgtctctccaacaccagcccccttcttttgacttttctcatctccctcacttgtatgttttcccttcctcgataatgctgatacccagatggtaggcacggcccaggataggcaggggtctctgcgctccagtggctgtagtggttttcctgcctgctctgaagaagacactggctaaggtggtgtcttagcctactgtatcctagaggtgggttattcatagtctgcccactgcccaacacactctaggcctgctggggcctactctaactctgcttgctggcttgccaccctggcacacagtgtaggcttccctgtagagccaggctttagaaaactgtatgagtacttctctgagaactgctggaggggccctgcctgccaggacttttcaacttccagccctgtcatctatatcacttctgaggaccccgtgtgggggtcacgagaacaagaccatatgtagtgctttctgttctcccttgggtcccaggctctgaatcaatctggtcccaagatataagggatgattggtgctgaggctggtgtctgtttctgaagttttgaagacaagggttggctcaagcctccctgtgttcagtcctccactcaatgcagaactcagtgaactcagaattctcagcccagatgccagcatagcccagcatagcccagcatagcccaggagctactggagcatcagtttgaaaccaggtccgcaggaactagtgggcaacagtgtgtgaggccagtggtctttggggtattgtattgaattgagaggtcctgcttagcagtcagcatgcccacaacctgttctctacggtggtccggattcccctcagcaagcacacctgaatctttactacatcccagttcctggttggctcctgacttcgggttactatggctgtgatgaaacactacgactaaaagcaatgtggggaagaaagttaatttttttactcgaccttccatagacagggttcatcactaaaagcagagggcagaggaaaagatagctcagcggttaagagtgctgtctactcaacaaagaggtcttgagttcaattcccagcaaccacatggtggctcacaactgtctatcctgggatctgatgcccttttctggcatacaggtatacatacagatagaggactcatatacataaaataaataaataaatctttaaaagcaacaagggcagaaattcaagcagggcagggacccagaggccaaagctgacgcagaggccatggaggggtgttgcttactggcttgctcctcatggcttgctcagcctgttttcttatagaacccacaaccaccaggccagagatgggaccacccacaaagggcagagcctttccctatcaatcactaatgggaaaacatcctgcagtcggatcttatgaagacattttctcagctgagcttccctcctatcagataactctagcttgtgtcaaggtgacttaaaactagccagcacagcaccttatgctcacatcacctgggtccctttggagaggacatagttaaagggagcccagaggcagtccctaggccacaggtcttcattgcccctctctgggacggattagacaggctgcagacctgttagctggaagagttagattcaggcaagagcttgaatctttacctgatcctggctatggagtcctggcctctaatgatcagctccctaacaacccaatggagccatatacctgcctgggccatggctgtgtctcctcttctttcagacactcctggcttgcctaggacacaggctagcatcctgtcaatgccaggaaggggcacagcagggaaagagcaatgctgttggcctgactgccaccaactggtgtacctgttagagggcaacctctattctctgcaccttggttcctagctctaagggatatgtggcccctaaaggtcttcatagcttgatatgggaggcaggggggctaagaacagcgcaagagtggtgagcttgcacagacccggatttgatctctgggtgagtgaggaggaaatgagatgggggtgggggaagccctatttctagctgtcttagcataggaactgaacctccttctgcagggcctgtgtcactgcccctttcccccagggagggcccctgcacggggcacctcagggcacagccctttttccctccctcctctcttagacctggaattactcaacatcctgccctgactcagttgctctcccctcagaccctcacagtcttccttctcttctggcccacttttggctgagcctgcccccaactttttctgcccttagtgggacaggccccatggggaccattcagatggcacttttttccccccctggggtggttttctgtggtggtgccctattcaggcaactgcaagaccctgtggcatttagcatatgcatgagagcacatgaagaagctagctatccctgtgtgctgaggattgtaatcctctctcatccttcccttgtctcctggaacccagcccagcctcctgtccctcccgttgacacgagccaatgctggctcagcaaactccagggctcccacccctggccatcagcccttggcacacaggcttgtgcttgagtactgcacacgtgttgcagctggggtacacgtgctggactgttatgcctactgtggccccgggggtgtgtgggaagtctggcagaaccaatccctccatcccccgatgcaatcatcagcttattctctcacggccactcgggcatgcttgactccttgatgcccgccgccactaggcacagctgccagctttgtgggcacagaggatgtggcgaattagtggtcatgcctcctcagtggaatggcaattgcactcagcatgcaggtgtctaccaaaggcagtccctacatccccgatgtactctcgagacccatctaaggactagatctagtctctagaaggtcccatgcagatgtaagacagccctccacagggagattcttccagctagttctctattatcagatgggtctaagatcctaggacctgcctatcccttagccctgcattcagcgagagaaggggtaaagatgtgaggatgccagggaggaaggaaaagggcacaaggaagaaagaaagggaaggaagctggaagcatggaaggacaaagatggtgaccacagtagaattaggatcccatggttcctgtcagtggcaggcagctatcaggctgtctgtgcctccctgagcccctggggcatcttctaaatgctttgctggcctctgagccaagcactgcataccatcccgtggggagtgacaggccagcactggtcaacgaggatgatggctacttttgttcacagggtaacatctccatggttacagcctttgcacattcctcttagtactttaccaatctcaaagcagttgccaagcccttgggccctaataagtgagggtcccagtgccctctttttaaaattccttgccatttgttttgcagaatttactgcaaataaagccaaccccaggcaatgtctaaaccatgagttaaccccccagcaaggtctcagagaactgtgccccagagagctgccaaggttcagggaggagtatgaggagacaggatttctagttccttaataattccttctgtctcagccactgtgttcatcttgtttcagccacaaaactacctttattggtaaggaacattatttacccagtttcacacttgaagaggtccagagacgttaacacatcgattcaaaagcacagcctgtaagtcacatagccactgttagctgatcgacactatttcccctgggcaatggctgggtgattccagggatccccttgggaacaggctagagcactggctctcaacctgtgcgggtcgtgacctccttgaggggtaggggtgagggcagtgtcaaacaacccttttacaggagtcgtttaagaccgttggaaaaaaaaccagatatttgcattatttttcgtaacagaagcaagattatagttatggagtagtgacaaaaattatgttacagttggaggtcagcacagcatgaggaactgtatttaagggttgcggcattaggaaggttgagaatcactggcctagcggatctgaatcaggaacacggacgtacagctctgcgccactcctgccttcctctggtgcctctagccttgcccatggtgttctgggcctgcctgctacccaccagctgtgcggccctgtgagcacaggcctttctgctccgctctgaattgccacgttggcggcagaagcgggaagcgtattgtgcgcagaaacaaaacggagtggttttttttttcctttttctgaaggtggtaatggtgcaattagtggcgaagccatcaccccctcctccccggctcgcctccctccttcctctccacctcccttctctttctttcctgagaaaaaaagtggctgagttgaaaagatctcccgtcaatctttctgtaacggactcaggaagagggatagagggccccctaatgtttccagggtcctcgagcctcagttgggtcaggcacttgttggtgctggagaatattcaaaggtaccactatgttccccacaagggagttgagcaatggattctgaggagcaagtttgaaacagagaatttgcgttcccaggtcttgtgatctgccccttgttcactgggggacaaatgctggcatgagaccctgagacctctgctcagccacctttctctctctctctctctctctctctctctctctctctctctctctctctctctctctctgtccttaatggaggtgtgtgtgtgttcaagaccaagctgcagtgttggagtgcttgtgggctcattttaaaacttccatgttttgccttctagaaactgaaacataagaaccccattatggccttaggtcacttcatctccatggggttcttcttctgattttctagaaaatgagatgggggtgcagagagcttcctcagtgacctgcccagggtcacatcagaaatgtcagagctagaacttgaactcagattactaatcttaaattccatgccttgggggcatgcaagtacgatatacagaaggagtgaactcattagggcagatgaccaatgagtttaggaaagaagagtccagggcagggtacatctacaccacccgcccagccctgggtgagtccagccacgttcacctcattatagttgcctctctccagtcctaccttgacgggaagcacaagcagaaactgggacaggagccccaggagaccaaatcttcatggtccctctgggaggatgggtggggagagctgtggcagaggcctcaggaggggccctgctgctcagtggtgacagataggggtgagaaagcagacagagtcattccgtcagcattctgggtctgtttggtacttcttctcacgctaaggtggcggtgtgatatgcacaatggctaaaaagcagggagagctggaaagaaacaaggacagagacagaggccaagtcaaccagaccaattcccagaggaagcaaagaaaccattacagagactacaagggggaagggaaggagagatgaattagcttcccctgtaaaccttagaacccagctgttgccagggcaacggggcaatacctgtctcttcagaggagatgaagttgccagggtaactacatcctgtctttctcaaggaccatcccagaatgtggcacccactagccgttaccatagcaactgcctctttgccccacttaatcccatcccgtctgttaaaagggccctatagttggaggtgggggaggtaggaagagcgatgatcacttgtggactaagtttgttcgcatccccttctccaaccccctcagtacatcaccctgggggaacagggtccacttgctcctgggcccacacagtcctgcagtattgtgtatataaggccagggcaaagaggagcaggttttaaagtgaaaggcaggcaggtgttggggaggcagttaccggggcaacgggaacagggcgtttcggaggtggttgccatggggacctggatgctgacgaaggctcgcgaggctgtgagcagccacagtgccctgctcagaagccccaagctcgtcagtcaagccggttctccgtttgcactcaggagcacgggcaggcgagtggcccctagttctgggggcagcgcttcagcatcccagccctagttcccagcctaaagcctcgcctgcctgcccagtgccaggatggctaccatcacctgcacccgattcacagaagagtaccagctctttgaggaactgggaaagtgagtcacacctcagggagtcctagagagcatggggatcagtctccttgggcagggggagggggcgtgtgcctatgtggccagagctgtcccgtgcatgcagagggaggtgtgcagcatgatttggaagcactgtgtatgcatagggtgtccagagttaggcgctgacacatttatgagtccagtcagcctggtgtgtgtgtgtgtgtgtgtgtgtgtgatggaaaggaaacagattggtggtgtatgcacacacctatgcatataaatacacatgacctgggttcacaaagatatctagaaacttggggtttgaaagggattttcccacttggctggatctgagctggaatctatttttgtagttgtacttagaaacctccaatgacaaagaaagtttgccaccccctgacctggagatcttgtctttagacactgtgcagagtggctagctttctcctagcacatcccctccggcttccccagataccttccgggagcaacagcttcagtacagaaggagttaatataaagcaatcacagtgttgggaggaggggaaggacagtcagccagccggggggtgccactgtggcactgactatacaaaacaactgtggtcctttggcaaagttgcccatcgtgttatatctcaggaggctgagaggagaaaggttccctccagaagagcagcaggctacagatataagagaaggtttctagatgttcccagctaggttatggggtcctgggttggatcaggagttgggggagcagtttggcagagtgccccacggatgcatacgtgctcctaccagtcctgtttggttcctgctgtagcgcagtaacatgagacaaggggccctgtgagcagatgtgtcagtgtgagctcctgcaggtacacagatattgaggagagactatatatgaaatctgtgtgtgtgggggggaacaaatggagttgtgtaagaactgacactgggcacactgcaaactgaaagggcaaacactggtgcaagtaaaacaagaagagatgtgtgtgtcatttgcatggcaagcccgcccccctccaaaaaatgttcatgcgccctgcaagggtgcatgtgtgcaattatgcaagggttgttcttggctaggtgatgttgcagcaagggtatggacatgcatctgtgtgcacatgtgtggcaggtcagagatggatactctcagtgaatgtgtgtgtgtgtgtgtgtgtgtgtgtgtgtgtgtgtgtgtgtgcgtgcgcgcgcgcgcatgtgtaaggtcacagatgtgaaatgtgaacagaatgttcttgagtgtgcatgtatcttggggactatgtaaaggaagctgtgtgtgtgtgtgtgtgtgtgtgtgtgtgtgcgcgcgcgcgcatgtgtaaggtcacagatgtgaaatgtgaacagaatgttcttgagtgtgcatgtatcttggggactatgtaaaggaagctgtgtgtgtgtgtgtgtgtgtgtgtgtgtgtgtgtggcctaggctcatgggctcatgtgggtgtgtgggtgttgtaggcatgtgtgagcttatgctggtgtctgcatatgtgtgggaggtggacctatggctgtgtataagcacagcccctgaacacacttacacacagagagagagagagagacagagacagagacagagagacagagagagagacagatggagagacagagagggatagagagacagagacagctcccttgtgcaaatgtgtattcatatttgtctacagactttctgctgttctgcgtgtctttgcgttggaggcaggggtaggggcaggaatgtagtttttagggtggctcaggagaactgtcttttaaagtttatctgggacccctttccagagcatgtctagtgttcccttggaacctaaggatttcttgaatagtcaggagctgcctttcaggggccactgaggctggttcaggcaagactgcgtcacagagcgcagtggaaggaattaagatgggacttcagggatcacagtgacagtaaactgctcttttgccctgagaagaaatggggatcattagaactaggctctgtgggctgactttgccttctcagccccccccccccgccttcttggatactcagaggtgtcagagaaggggcagaggaaaactgagggtggcagggacgcctgggtcttgttcaatcaattacagatctcctccttccagaactattggtgcttttaacctttttttaggtcacttattcctccaggattcagatgaaagtctaaatagatattccctagaaaaacgtataagcctacaaaatgttgcttgcagtgtcagagcttgtgggacctcaggaaacagtgcaccaacctgtgcttgaagatgcttgggtgaaggagaaggggctgtggtgggccggcttctgtctggtgtgtccgtgtgacacaggccagggtaccctatgaaggatgagccctgtggcttttgctctgcaccttagccttggcctgagcatctggtggggtagggaggggctgccctacatgacccttagctctgtgacactgggcaggctgccactctttctgacctgcaagctggagatttagaagactgggaggagtatgtagatggcatgtgaagacacagcctcaagcctgacacgcagtaggcatttggcaggacgttgctgctggggtggctgttgtcctcaaggattgggccagccttt

SEQ ID NO: 94 - DNA, 2213 bp, Mus musculus
gcacttttgggaagcctccactccacgactcaggctggcccgtcagagctgggggagagggctgcgggaggaggctcggcgggagcctgaccttccgggagcgccctgctgcctgtccgagggtcctggaccagagccccgagggctctgactgcatccaggcgggcgggagagcaggcgttgcgcccctagcgcggcaggctctgaggtcctgggaaccccgctcgcccagaccggcgtcgcaatgcatgctctctcaggattctccctggtcagcctactcagcttgggctacctgtcctgggattgggctaagcccggccttgtggctgatgggcctgccgaggctggcgatcagccttcggtggctccaccgcagcctccacacattatcttcatcctcaccgacgaccaagggtaccacgacgtgggataccatggctcggatatcgagaccccaacgctggaccggctagcagctgagggcgtcaaactggagaattattacatccagcccatatgtacaccttcgaggagtcaactcctcaccggcaggtaccagatccatacaggattgcagcactccattatccgcccacggcagcccaactgtctgcccctggaccaggtgacgctgccccagaagctacaggaggcaggctactccacccacatggtgggcaagtggcatctgggcttctaccggaaggagtgcttgcctacccgccggggcttcgacaccttcctgggttccctcacaggcaatgtggattactacacctacgacaactgtgatggcccaggggtttgtgggtttgacctgcacgagggtgagagcgtggcctgggggctcagcggccagtactccactatgctctacgctcagcgtgcaagccacatcctggccagccacaatccccagaatcccctctttctctatgtggccttccaggcagtacacacgcccctacagtcacctcgagaatacctataccgctaccgcacgatgggcaacgtagcacggcgcaagtacgcagccatggtgacctgcatggacgaggctgtgcgtaacatcacctgggccctcaagcgctatggtttctataacaacagtgtcattatcttctccagtgacaatggtggccagaccttctcagggggtagcaactggccccttcgaggacgcaagggtacttactgggaaggtggtgtgaggggcctgggttttgtccacagcccactgctcaagaaaaagagacggaccagtcgggccctggtccatatcacagactggtacccaacactggtgggtctggcaggcggtactacatcagcagctgatgggctggatggctatgatgtatggccagccattagtgagggccgggcctcaccacgcacagagatcctacacaacatcgaccccctctacaaccatgcccggcatggatccttggagggtggctttgggatctggaatacagcagtgcaggctgctatccgagttggggagtggaagctgctcactggagacccaggctatggtgactggattccacctcagacactggcctccttccctggcagctggtggaacctggagcggatggccagcatccgccaggctgtgtggctctttaacatcagtgctgacccttacgaacgagaggacctggctggccagcgacccgatgtagtccgcacccttctggctcgcctggctgattataaccgtactgccatccccgtgcgttacccagctgcgaaccctcgggcccatcctgactttaatggggctctctgtggtgctcttggatatcagctggagtatggccagctggctgctgctctgttgaacaactcaatgagagaacggacagggtaggctctgagaaatctttacgttcctggagcctcatgacttgggagcctagtggaattcttctcttttggtccccaacatctggggggagggggaactggctgagcctgagccactgtatagtgagggtgggggaaacagctgtgaaaggagcctttgatttggtcttgaacacagttcttccccacagggccttgatttccctacttgcaaaggagtagggaaatatgagccttggctctgcctacctcacgttgctggtgctgtagaaaactggccaggctgatggttgtggaggagcctgtgaacttgattaaagtgccattatcca

SEQ ID NO: 95 - protein, 575 aa, Mus musculus
LHPGGRESRRCAPSAAGSEVLGTPLAQTGVAMHALSGFSLVSLLSLGYLSWDWAKPGLVADGPAEAGDQPSVAPPQPPHIIFILTDDQGYHDVGYHGSDIETPTLDRLAAEGVKLENYYIQPICTPSRSQLLTGRYQIHTGLQHSIIRPRQPNCLPLDQVTLPQKLQEAGYSTHMVGKWHLGFYRKECLPTRRGFDTFLGSLTGNVDYYTYDNCDGPGVCGFDLHEGESVAWGLSGQYSTMLYAQRASHILASHNPQNPLFLYVAFQAVHTPLQSPREYLYRYRTMGNVARRKYAAMVTCMDEAVRNITWALKRYGFYNNSVIIFSSDNGGQTFSGGSNWPLRGRKGTYWEGGVRGLGFVHSPLLKKKRRTSRALVHITDWYPTLVGLAGGTTSAADGLDGYDVWPAISEGRDRTEILHNIDPLYNHARHGSLEGGFGIWNTAVQAAIRVGEWKLLTGDPGYGDWIPPQTLASFPGSWWNLERMASIRQAVWLFNISADPYEREDLAGQRPDVVRTLLARLADYNRTAIPVRYPAANPRAHPDFNGALCGALGYQLEYGQLAAALLNNSMRERTG

SEQ ID NO: 96 - DNA, 25901 bp, Homo sapiens
  misc_feature (1)...(25901): n = A,T,C or G
gacaccctcaaatgagaccttggagccatgctgctcgcaggaaactatcccctgcctgaagtcctggatccaggggacgagggctcagcctccaggtccaactgccagcgttggtctggaagcttcctgctgagcagaaactcactaatccctaaaccagctcttcctgccagtgaccagccaattaccactgcctgcctcagctccagcccagcttcattcaggaccgaggcactcttaatcatgtgaaggacacatattttggggtgttctcctctctgagcctcagtgtcttcacaagtctaagggaatgacaatggaccatcaactccaagagggccaggtggtttgtcttgtccatatctgtagtcttagtcccagtgagtgaaaggcacataatagttgctcagtaagtgcttgttgagcaaatgaattggataaagagatccttgatttctgtgtggataagacagcattctcgcagtagttggtactcatccagtagcaagtgacagatgtcaacacaaattggtgtaagaaagaaggaacgtattgttcccataactgaagtccaggggagtagttctagcttcaggtaggactggaaaggacccatgtactcaaatggtgttattgggaatctgtctttacctctcactttgctttttttctcttcactacagttagctccaggcaggtccaggcttctaatcttcttgctccaagtctagcagcaaagagacaatgaacaatcttgttctcaaaaatccaaacaaaattctcagaattgagtctcactagacagtcttaggtcacttgtgcattcctgaactaatcactttgaccagggacatttgatgctctaattgtccaagcctgctcctggagtcaacccatcagtggaaacccatcaaagaaaatctaggttctgtttccaagaaaggggagcagctgcaaggcagacaataggtgcccatcacagtatttgactaaagtctgaacacctaggcaactcttaccttctctaagcttcagtctcttcatatgtcattgataacaatgatgacactaacaaaattcctgccccttttacatcccagagctttcgtgaggtccaaacaagatcatgagttatgataataattaacatttattgaaggatcactggacatccggccctgtgctaagtaaaccctttacacatttagttttatcgttaccacaatccacgttactgatgagaagcaggttgagagaggctacaaggcttgtatactggtcacacagctaggaagggtggagctggggtttaaagcagtaccctcaagcatgaagctatatataaactgtaaataattttacaagtgtaagggattattagtaacggcctgtactattaataatagaaaatatttaaaaccctgaaaggaaattcaaataaattcaaacaaatgtttgtttagcacctactatgggctgatcactcaccaggggctcagaaagagacacataaataactctgaaacaggcagactgtgatctaatagaaccataaacatgccccaggggactgtggagagcaagagattgactgaatagggaaggaagggaggaggaggtctagaaaagtctcttggaagcggtgggatttgagctgggctttaaagattaaaggacttcaacaaaggaagggaaagggaaaatcaacttttaagagacctgaaaggatctaaagactcagaacagagttcttggataagggttcagcacttctatgcaaaataactttagcaccagcagggacttcaaaagtgattgacttagcagagcacagtagttgccatgggaacagaggcaagcctcatccctgtcattagagagcatctctggctttgagcagtctagccaaggccaggaggcagcgggggctgggttgtgctatcccttagaagaaaaacccagcaagattgctgccccgagagactgactctcatttcacagggaggcagagctgacaggtgacatctgggtctgagaacatagaaagccagaggaagcctctgcctcaaggggctttgggacatcctgaagctattggagcaggcaagggagcctcaaggagggaatgggaagggcaggggacaagcctgagagcggcttccaagatggatcaattcccactcagtctgggaggagcagagcagtgctggaggcagctccacccagcatcccagcgtggcagggggtggagggcgtctcccagagcatgcactcatgtcactcctaggcccactcagacctctcaggcctctggggcccactgccagggcattccagtgcattgggagcgttggcatctaaccactcaagtgcagaggggaccccattcacaggcttggtgacaggagagcatatggtggggactttaatgcagcaggcaataggtttgacacctatattcaaatcatggccttgacactttctagctgtgtgactttgggcaagttactcaccctttctgtgtttctcggtttctccatgggcaagatgcagataatgataataattttacctaccttataggtaggtaagaatttagtgagataatagatataaagagttacgcatggtacctggcacagtagatcgtcaataaatgtaagctattatattattattatcacttccgaatttcaatttggtatcgagtcaggtttttttaatttatttatttttatttcaggcagtgtctcttatcatttgtgctaaaagccagtttctccaagtatagtagatgatgacaatgacagcagtaatagtagtgacgggacccatttaccttccatatatccagtgacattatcatgaagaaggaaggcaaagttctagtgctgaatgccaggctaaacgctcgagctttttatttcaggcagctagtggctattgaaattttggaggagaataacttgatcaggggaatgtagatttttgccctgaggctatacacttgtagaaatagaatctaagtataacaacaacaaagcttagtaacaaaaacaataatagctaccattttcagagagctaattgtataccaggcactgtgctaagagcttcagaagccttgtctgttgtaatcctcacaacaatcttatgaggttatatatttctccttctccttctcctcctcctcctcctcctcctcttcttcttcttcttcctctcacccccattttacaagtaagaaaactgggcacagagaggttaagtcatgcagctagcaaatggcagagctgggctagaacacaggcgatctagttctaggagtctcacatttaaccagaacacgctttttccttccctgagccttggaaggccctcgtggtggggttggggggcagcctgccaccctcacttttgggagcccctctgtttgtctgcatctgagcactgccactctctatttgattctctgggacttcacctctttctttgaaagtatgtgtgtgtttgtgtgtatgtgtgtgtggggggtgtttgtataagagagaaactgcagctgaccagtgatgacagaagcctctggacatcaaagtgggcagagccctggatggatgggctggaggcaggcctgggtcccattaggctaattcctctcaaggttggaagaggccagggcgggaacttctgagaacatggagaacaagtcctttcatacgacctccctttgagcaggccttggggtgggaccggggtcgggtgggtggagggtggggagtgtgtggagaggtgaggccacagtcaggctgggcaaacagattgggcagcggctgtgagcacagagcgcccattgtgtacccagagctctgctttcaataatcttctcggaagaatgtttcattgagcgccagagaaaggagccattgaaatgccagggctgggccctatgaagggttaaagacaaggaggccatgggtacctgggctcttgcctatcctggctcaaagacctgatatagggatcctgatcactaagacaagggcactcagtgagaccacccagaggtctggaagcgagggtcagagggggagatgtatgtctgccccagaaaggctaaagtaggtgccccagtatcaaggaggaaaacccctgtcttcccagcaccattttgcccaagtaatatccaagaagatgttagataccttctcagataccccttcagcctgccttctgtggagagcaacccatcgggcagacgtgtctctgcgtggacttcctgcgtggacctcctgcgtggacccataccacgggtcctgcaatccattctccacaatgcagccgtatggcttccttaaacacctgtggcctttccattaatcagtaattaattataatgaatgatgctgaagcagagagtgtgggagttacggtaagagccagtggtcactaaactaggtgaccaagggaacatgtagagttttctcttccaaatagaaagacctgctcattagagggatatggcctggctgtcagagagggcaccagagtgggattctctgcttccacactgagtcccgcgtgtctttgccagctactgaagcttgtggggcttgaagtgtgggtaacaccatgctggcctcagtgggctgcacagaggaggcagaaggtggatgagaggggcctgccactggggagggagagcactcttgttgggcagctgagaatgacctccggcaccaccatggaacccgctgaagatgttgctgcctcactgagcctgtgtctgcagagaggatgttctgcaactgaagctgaccttgcactatgaaccgttcatattaaccattttggatggaaaccttaaaaaacagatgatgcctttctggctttcttaaaaagagatcctcaactcttaaaaagagatctaaactcacttctgtgcggaacggtgatttggcgatgtttctgggtctgttcaggtgaatatagttcttggctcctgcaccgataaaccccaaactcccaggcttttggaattcatcagtttgaatttttgtttattcttttgtttctccttaatttttcactgtgaaacatgtaagcatattttactataaaataggcaagtgtctcactttcttatatattccatctgagctgcttctaatattctcggactgggaaaggaaatgattggccttataagaattgtgaatgaagtaagagtcagtagacttaagagttaggaaggcctgaggagctctcctctgagttaagtgattgaactctgtgatattttgagtgttcagaggccttctatgttttcttttggtctttgatttgatcctgcctagacaaattgacccctagagagaggacgacagcatgcataatttatgcataaggtctttgccaagggcaataaatcagaaggaaataatattggtacttagataattttagttcaaagatggccaaacatacacatatacctagccactaacatgcacacacacacacacacacacatacacacgaatagcaatgacagacaaagccacaaaaccaactaacccagtttttcacttttatatctccgctccctaaaaagttgtctgggaacaaatgattaaaatcttaacattttcaaatgggaaagagctttcacagtcctttcattttgcttccctctttttagttcaggaatctcttctattatctcctggatagacaggcactttaacccccttcttgcatggatccagtaatgggaagctcagtactttctgaagtctgatttcatcaatggaaatctgtgacaggaagtaacaaaactacaccctgccacatctgaaatgcattttgtatgcagatattaggctttctgtagtgttgtaatgtggatgtcgtttgggggttaagggaggagatcacatctgtgagaatggggggacagatctttcctgtgtggggtggacattcctcttgtcaattgtcttggaaacagctgagttctgagacagaaactgaaaaggctagtttagcttgctggagagggaatgtctgtgtctctaagtcttaattcttgggcctgaacttgagacatgttggagttttgagagtctgtgtaggttggggtagggctgatggacattgtcccagggaagacggcaggtaagcaccttgtcttgtagagaacacaaagggaagataagtgagccaatcttgaaagctatatgaccacgattcacattacactttgtgtttattccctccttgtcatccttgagcctttggaaatgtctggtttaaatgttgcagcctggcctagctgtgtaatggcatcactggaattgctgagggtcagtgtttatttccttagaatgatagagggaggatagtgctctctgaggcctctgtggattttggtgattatggagactcttaagaaaaaagtgagtattggggaacaagagttgggccctaagtccacccactcccctccacatggtgattcaccaatcactgtcatccttttattaagcaggtggccggatttcttacaaaagcaatcccttaaattggtccgaaatctgttttcctgtaactttcacccacaggacttagtccttcctctcaaaagcacagagaacaatcatcgtaaccattcacattcaccaagtgcttactgtgtgctgggcactttactgagcattgtagtagatcttatatatactattatcccattttacagatgaagaaattgaggctaagggaggtgaaataacttgtgcaaggccagaccccaaatgagtggcaggatttgaactcaaatagtctgatagcagagcccactgtcttgaattctgaaatactacttgtctcagtgacagccccacagaggtctgccgcctgtgacctttcctccctgggccttttttgatccaggtggaacccccaccccatccccttgctgcttctctttgtgcttggagtagaagggaggcagccctgcccagttccttttgccctggggcaatagaaagaatgcaaaaccctagtccacctgacctctggtgacttgttccacttcgaccccccaggacagacagccttgtggaagcctctggaagcaccattttagcagccttcccctcaggaggctgtatttttcctgtctgtcctcaacatgtcttctgccagaacaacaagctcagttttcccttctgataaatctggtcaccctaaatatggggctttgagcaaatgggagcggctggccccacgcagccctcatttcaaaatgcagattcacacgggctgctattttggaggtctggtttctttccccacacgcagtggttttaagtaagagggaagggatcatgacagaatcttggcaggggaaagatgctaggagagaagatgcacctgggcagtctttgcttcccaaagtccccaaacactggcccttcaagaagctggttggggggtggggggagcaggaaagagggtccatggtaacataacactgggaaatacagcctaaccagcccctcctgcagatcagcagtgtgcatgttaaacatttgaaatcctagaagtaaagaagcctaactggttttgtttagcccagtttttccatttaaaaatgtagcctagtaaaattttgcaaaacaatgatgcagagcagagcttgcaaaccggcaccgatggtctgatatattcctgggagaggtctgatttggcctacaaagtgcttaaattttgctttcaattagtcactaacatttcacaattggaatagttctcctaatagataaagagggtattcctcttgaaaaatcagaagatctggaaacactggtccgtattcttgcctgactgtagtcagctggaagccaggctgtggtttttaacttgctgcagcccctgtgtctccttagggcaagacaactatctcttgctctactcatttatgatgctcatcgggttccagagtcccccaagcttgccttctctggtgtggaggtttccttgggtaggctggcctaggtgaccattggggcccattcatccattcactcatgcaacatatactgattgagcttatactgtgtgctgcaccctgtggatacgagatggataaaacagcccctgccctctggattccagcgctggcattctaagattctagttgggaactgcagaacgaggaggagggaggggttgaggagaggggagctggcaaggctacaaccaagcttcctgacttgcagccgcgggggcttgccaaagtgcttgccattctccatcgctttctctaccggctcaccgaagggagccgccactccaacagccacggtgagccttagagacatagccactgacttgttctgtgacttagacgcgttgaggctcatctccgggcctcagtttctccatctgtagaatgacccggttggactaggaaatgatgggctttccttccagggctggcactcagagaggctaagactccatgatcgaggaatgtctgacccagccattctggagctgttccatcgaattccaagcagccccactccctcctttccccatcccggtcaggggcgggcgctggagccagcaggccgagagggccggggcttcccgcccgggaggtggagccgctgctctgcgtcccgcccctccacctggggctcggcccggcccggcagatgttacaactttttcgaattctctcccgccgtgtcccctcgacccgcccaacttgtgcctccctccccttcccctctggggtcctgcccacctccctgcagggagctgggctgttttaaggactccgggtggggcgagaggccgggaaagcagaggagagagaaattaggaggcgggagaaatccagggcaagaaggaagaggggagtcagaggatggtagagagcactttttggaagctgccacgccgcgtctcaggctggccgggctgagccggggaagagggagcaaaggcggcgcagggcctgcgcttaggcagcgggaggcagctcggcgcgggcctgacctccccagagcgccccgctgcggccgagcagatccggcccagccgtccggcagccagtcccggaccagacactggaccgtccccggggggcgctgaactccctcgcagcatccgagccggcgggccggtggtgcgccctgggcgcgcgaggtggtgaggccccaggagcccggcgcgccgggacgcgcgggccggcttggcgatgcacaccctcactggcttctccctggtcagcctgctcagcttcggctacctgtcctgggactgggccaagccgagcttcgtggccgacgccccgggaggnnnnnnnnnnnnnnnnnnnnaagaaagaagagatcaagaatatgaggtataaaagaagattaggaattgagataaatgattaagatagagataaaaaaggaaagattcataggagtgtaaagtacggggaaaagaaggaagaatgaatgaagcaagtaataaaaactaagagagaaggattaaaaacaaatgaaatcgaagttagtaaaaaaaacagaggataagtagggaataaaaattattaagaaccaaatatagtaccaaggaaggaacaaaaaagatggatagccttaagcaagaaaataaaaatgatagagccaaaaagaaagaccaatttaaaaagggcagaattgggaacaaggtccaaacaatcaaaaagaataagaggtgtaaaccttcaagtgctggaagaaagaagccaggaatgtatactgacagcattaataaggacacaaaggtaaaacgatataaataacagtaaagcaagcagtgaaaaactgattcccatacaaatctcatggaaggatggaagagtgatgcaagagagatcctgaataagttcagtgcatgtgtataatcaagacctatataacagattgttaatgtatagtgttcaacagatgaataaaagcctccccacatcatcttcatcctcacggacgaccaaggctaccacgacgtgggctaccatggttcagatatcgagacccctacgctggacaggctggcggccaagggggtcaagttggagaattattacatccagcccatctgcacgccttcgcggagccagctcctcactggcaggtaggcgtggctcaaggccccggggctgggcatctaaaccccaaatcaacccagttgatagatttctcctgccagtaccaccccatgctgggatctgggaaatctcctgttggctgtgtaatcattagtaagtccctcgccctctctaggcctcaattacccttcctttacactgaatgggcttcatcatctttgaggtcttcttgctttgatgttccaggacactcacattccacacaacgtggagacatctggtcatccctttgttagaggaacatggcagcctctgacatttactgctgcttctatttatggaccccgagaccctgagcaagtcatttaatttctctaagcctcagttttcttgtccataaaatggagcaaagaacagttttcatcttgaaaaggagtggcaaagttggaatgagttgtgtgtaacctgcttggctgtcaatatatggcagcctctatgtctcctgagggattcaggtccccatactgcttgatgaatacattgggagaagaccaaggaattgataggtggaagagaaagacacataggataccatgacctgtgtagccttagggtggttacttcatttctctgagcctctgttttttcatctgcaaaatcctcccaagttggctgggagccccaagtagacatgctgcttcctccacaaggaaatgtccacaggcgaggcagcaggattacaggattaaaagagcagggaaacaggaggtgggggtatggaaggcaaactctggccacttaggagaaaatcctttggcagtgctgaagctaattctccttggatggggtccaaggcatgctttctcccaagttccacccaagagccactaatgtgatctcaggaaccagaagccttagtctccctgtttcttagtctcactatttcttggatgggagaaattgaggcaaggactcagggagggcctagtttggtgcccgtgcccaacttcagggtctgtgggagataggattgagaggccaggtgtttggcgggggtcccggagctgggcatcaaatggcgtcctttgttccttcgatctggcacccagcgtttagatccaggaatcagaaggagaacagaagaaagaaggaggggtgtggggtgtgtatgggttggggtggtggtgcaggttagtggtgtagtggtgaagaccaatgttgacctgcagaagagggtggaggagtctgcattcccaagagttatacacaacttagcgtttctgtcctaagaggtgacttttggtttaagtagcggaatgagcagacagcaggagggcagtgctccagtcccctgatctgcgaagctaactgaaggtggccggccagtgcctgccctcccccaccctgcagctggctccatctcattgatgcttacagccctcgttagtgtttgttaacacatccagttgtgttttgtgacactggagagaggcaaagtttctcttgtgactcacttgcaggtgggctttggtgactcttagctggcccatccgctttacaagccagcgctccacagcaccccacctctatgaagaccggcccagttgggactcagggccctagggtgcttctcatatcaaatccaataatttattagcttgattgaggcctggagaggccgttatcaccaaaagattttgagcatgacttgagtggacccaggttcaaagcttagctccactgcttgtcagctctctgaacttgggtcattgctgcactttcgggggacttggttttatcatctgtagaatgggggtggtaatagacttccctgtaggtttttaaaatgagagttaaatgagataatgtatgtgtatggcacatagtgttaaaaatggcagtagtagctaattagagctaacaacaataacagctttaagataaggaaaccaaaacagaaactcactcctgtgctctggttaaagatgtcaggtattcagggcttggcttaatttggatgcctggaggtgagaaaaaggtgtgggattttaacatacttgtgaagttccaggcttcttatttactctgggactttcaagacttgagtaaaggcaagacaccataagcagatcacatgggagccttgaccacagaagggggaagatgggatatgaatggataaatgaggaattcaggatttgcctaaccatttactcctgcctcagggtgatagcctggatcaaggggtcatatgagctcacaggcaggcacttgggagctggtcttaaaaaactgggaaactagacgagtcttagagatttcccatttcaaccaactcctatacgggagcaaactgaggcccccatgtgggaagagatacggcagcccggtttgctgaaaaagagtccctgcttagactctgcttggatttatgttcaagtcctggctctgttcctgaccaccgagcgacctcagttaaggcccttccccttcccttaaaaagaccttaggtcctttttaagatgaggtgagtaaactagagaatgaattgggtcccttctggctctaaaaccctcttaagtgtcattcattcattcatttcataaataattgagtgctctttgaacatcacttgggtgctaggaatagaaggttgaataaaggacagtctcatcacatgtcactgggcgcaagagcatgtgcagacgagtataatcccacggccaagtaagaaaacgatggtgtgtactaaatgctaggggaacccagaagcaaaagtgactaattctttgggagagttatgaaagactttatagcatggataacatttggactgagctttgaagagtgagtaagagtttgcctgggaaagcagggcttgctctaggccccagtgcaagttaatagcttagagcttagggattccgaagtctggagccagactgcttgggttataaatcccactccaactactagccgtgtgagtcaccgggcaactaatttaatttaccaagcctcagttcccttatttggaaaatgggaacaataatatgtacctctgaatttgtggtgaggattaagtaagataattcacataagaggattagtgtaatgccaagctcacagtgagtgctcggtattagctattattattgtcattattaccctgggttcaacttttatctctccaacttcctagctgtgtgatcttgggtgagtggcttagccattctgagcttcaatctcctcatctgtaaaacgacaatatgatctacttccagtgattttgaggattcgatgagataatgcatttgaggtgcttagcacagtagatagtacctggtggttactgttactatttttgctggtagtgctgggaccacagcccacctcacagtggtactggggactggatggccagagcaatggtctgtagcttacctgtgccttctgtgccttcccctcctccccaccaggtaccagatccacacaggactccagcattccatcatccgcccacagcagcccaactgcctgcccctggaccaggtgacactgccacagaagctgcaggaggcaggttattccacccatatggtgggcaagtggcacctgggcttctaccggaaggagtgtctgcccacccgtcggggcttcgacaccttcctgggctcgctcacgggcaatgtggactattacacctatgacaactgtgatggcccaggcgtgtgcggcttcgacctgcacgagggtgagaatgtggcctgggggctcagcggccagtactccactatgctttacgcccagcgcgccagccatatcctggccagccacagccctcagcgtcccctcttcctctatgtggccttccaggcagtacacacacccctgcagtcccctcgtgagtacctgtaccgctaccgcaccatgggcaatgtggcccggcggaagtacgcggccatggtgacctgcatggatgaggctgtgcgcaacatcacctgggccctcaagcgctacggtttctacaacaacagtgtcatcatcttctccagtgacaatggtggccagactttctcggggggcagcaactggccgctccgaggacgcaagggcacttattgggaaggtggcgtgcggggcctaggctttgtccacagtcccctgctcaagcgaaagcaacggacaagccgggcactgatgcacatcactgactggtacccgaccctggtgggtctggcaggtggtaccacctcagcagccgatgggctagatggctacgacgtgtggccggccatcagcgagggccgggcctcaccacgcacggagatcctgcacaacattgacccactctacaaccatgcccagcatggctccctggagggcggctttggcatctggaacaccgccgtgcaggctgccatccgcgtgggtgagtggaagctgctgacaggagaccccggctatggcgattggatcccaccgcagacactggccaccttcccgggtagctggtggaacctggaacgaatggccagtgtccgccaggccgtgtggctcttcaacatcagtgctgacccttatgaacgggaggacctggctggccagcggcctgatgtggtccgcaccctgctggctcgcctggccgaatataaccgcacagccatcccggtacgctacccagctgagaacccccgggctcatcctgactttaatgggggtgcttgggggccctgggccagtgatgaggaagaggaggaagaggaagggagggctcgaagcttctcccggggtcgtcgcaagaaaaaatgcaagatttgcaagcttcgatcctttttccgtaaactcaacaccaggctaatgtcccaacggatctgatggtggggagggagaaaactgtcctttagaggatcttccccactccggcttggccctgctgtttctcagggagaagcctgtcacatctccatctacagggagttggagggtgtagagtcccttggttgaacagggtagggagcctggataggagtgggtgggaataaaccagactgggatgcctgtgtctcagtcctgcctcctcacggacttgctctgtgacctcaggtgacccacatgagcttttagcctcagtttcctcatctgtaaaatgagctctaatgactttgtgactctttggtgtggccctggagcctggggccacggtggagttcctggccggccttgccacttgacaactcctttaaggcttcccccttaacacgggatccctgtggtggtgtttgggagttgcctggaggcaactccaagcctggcccccagctgaagcatggcaatctggctgctctctacagggacccccaagcgctgtgggtggagggcaggggtcgggggggttgaccttcttgggtcttcacatggcctaggccagtcctccggtcagactggtgtcaggcaccgtggtgcaaaattcctcttctggcccctccagtacccagagaaactggctgggccattaactgctgcagcaccaagggtggtagaaagagctgtgaagagcccccaaaccagtaccaggacacctgggttctcctgtgacctggggcacagttcttgccctctaggccttgatttccccacctgcaagtggggatgccagccctggctctgcctccttcatgaggctctggaagactggccaaggttgtggaggagcttgtgaacttgattaaagtgtcgtaacatggaagtgagggatgcagtgctgtctgactatgagcatgtgtgggtgtgtgcatgtgtgtcctgggggcaggtatgagctcacggtcggccgagtgaacaggagaggaggtggacagcctggctaggcggtgggggaatgggagtcctgccacagacccactatgtgacctcaggcacatccctgaccctctctgggcctcaacatcccactatgttcagtgatgatctaagagcacttcccatttggccattctgggctagtgtgcatgtgtgtgtgttggggtggggggcaggctgagtggtagcgaggaggccacgggtgttgcagagcccgcctgccgcctagcgcgcctccatccgcacactgcgttctgcatatctcccttcaggttccagtcggcgcagtgtgtgtaggcgaaagccctgctgtgaatttttaaaatagttatttttgtcactggcaaaggaggcctgttaggactcatcagcttgtggatgagcaggatgggtggggtggggtgggtgcggtatgtgtgggggttcaggtattggttacagagttccatccccactgcagatgtggctgagtccaggagtgagggtctggcctgaggctgttgggtggaggtgaccattcatgctctaagccccttcctcctggccctattctttttaccccttatcacctcccccaactagcatctttccctgcctctatgatgttgattcccagctgtgtcatggggcaggagccaggataggcagaggcctctggattccagtgacctccagcatttcagtctgctcaggagggaggctctgaagaagtaagtcacctgttagggcggtggcccaggcctgacacaccctgggagatgagctgtccgtagttcgcccactcctcagggtactctagctctgctgggtgcttgtcccagctgtgtgggtggggcctttccagggtggcatggagccaaggcttccctgccactccgggcttgcacgagttgtatggaggcctctcctgtgcctgctgagtcagccctgcccgaggcctaccctccagctccagcccccacttctctcccggggcccctgccctttggcaccgcaagtgcaggaccgtgaatggccctttctgctgtcccctaatcaccgaggcttactgcctgtgaccaacctaaaccaagaaagactagctggggatggggctggcacctgttcctggtgccctgagaaggagacttgaccccaggtcttggtccagtctcaaatccagcccagagcttgcctagctgagtcctacccaacccagcgctcagcaaacagcccggtggccccacgcaagcttgagcctgcaacctggtctagaggagctggcggctggcctaggcctgagattggtggagggtcttgggtgccccagagcactcaagcactacgataacaggctcagcctgtggtgacttctgctcttcccagcaatcagcatggctcctgccagccccctcccatctcctgtggcccaagtttcctccagccggggcacctgggtctggactctgtgccaggccgccaactggcactgccaggcaggtgctcgtaccatttgagcacctgtgcttgtggggagggaagggagggcagatcagaggcagctccggtccctcgggccacagatctggggaagtggagcccagagatgcctggtgagaccccctgtttcttccttggctgcaccagatggcagctgatctgccagctgtaggggccagagccagggggcagcctgtccaagctgggccctgccagtagagtcctgggctctggtaacccattccccaagggccaagtgatagccccacacctggatggagggccagtgctctgggctccatctttctcaggaggaagtggaggttctactggggagacttcctgcaagctcttccaggactcgaactcaggtcctctaactgcaaggagtgctatgcagccatcggcccagtagccattgtcctctgtcccatggctctctgcttcactctcccctgcaagagtgcctcctgtgtgggagacctcagggacagttctgctccctgatccctgacttcccccacttcttcatgtaggcctagccttacttactgcaatgaatgaacccaatctccctccacccagaccctcagcaggaccatttctctcttggcccactttccaccaattctgccccccatgctcactgcccttagtgggacaggccctgtggggaccctttggatggcacactttctgtggtgcctgcccaggccctgcaggaccctggggcacttgggcatatgtgtgtgggctgtggaaggtgggatttcagtcagctgtcacaatgccactggggctacaatcacccatgcaggaacccagccctggtcacttttcatcccttctgtctctgtggagcactgcctgtgttcacgtgccaatccctattctggcatgtcaggactgggttcagcaacctccagggctcccacccctggcgaccagcccatagcatggaggcctgctctcgaataccacacgcgtgttgcagatgggggcacacgtgctgcctctcgtgtctgctttggccctggggagtggggagtttggcaggaacagtccccctcctgcaatcatcggctcattctctcagcgccacagaggcacggctggctcctcagtgcccgccaccaccgggcacagctgctagcctcgcgggctcaggggaggtggtgaattagcagtcatgccttctcagcagagtggctattaccctcaggaaggtggggggtgcctgtccgaggcagtgcccacaccgctgagctaggctctggaaggctcagaggggtgtgtgtgtgtgctcatgtgtaagactttcagaggggacttcttcctcttctccctcctcttcttctctcttccgcctctccagccatctctctgctatctggatcctgcagccctcaacttgcccatcccccaggaccgcatgcacagtgcaggccagcaggggagggagagaagagtgacagaaagagagggagctggaaaccagaaaggaagtaaaaaagatgagaaagacggagaactgagaaggaaggatgcaaaagagggaacaggaaaaatgagggagaggggaaggcaagaggagagaagaaaggagagtggaaaggagagatggaagtagggaagaaagagatgacaggagcggggctgtgctggccctgctcccagcagccacagaggctgcccccgtggtccacatcacatacagggagagaggtggccatcttcctgcctccattccttcacaccttcctctgagggacctgatgccagggtcttccccatgtgctctgctcacttctgagcatgctccatttcatcagtgggaatcgggagaggaaacaggggtcaggccagcacccagccacgcaggactgtcccagttcagaacattagatttccattaatacagcctcataatctcacagcatagttgcttttttgttttactgtgaatttttaaaacagcatcatcattcctttggcacccgatgagctggagagccttgtggttcctctccttctagctctagttctttgttctacagaaattgctgcaaactaggcttagacaaggtgatttccaaaccatgagctaaactccagtgcagactaagggaacagtgccctgaagtgctgggactcaagatgatggtgtgtgcttccgtgattcagggagtggtgtgtgaggggagaggacttttgagtttcttgattataatttcccatttattgagcatttatagtgtcagccactgtgcttgtctcatttaatctacagaacagcctggaggtagggaatattattgacccaattatgcagatgaagacacagaggcacggagaagttaggatattcatccaaaatcacatagcccgtaagtcgtggagtcaccctaactactaagcaacactgcctctcctgtccctgtgcaatggcaggtggccttggtggtcactaagggctcttccagcactttcttgtgtggaagccatcccctcctgggggacaggctagagggtctgggacaggagggtggcagtgcagccctcccccacctccccacataggcctgtagcttggccaccgtgttctgtgccctgcctgctgcccactggctgtgcggcccccaggcataggcctctccactctgcctctgaattgcaacgttggcggcagaagcgggaagcatattgtgcgcagaaacaaaactgagtggttttcccttttcccaaaggtggtaatggtgcaattagtggctaagccattacccccctcctcccttgctcacttcccctcttcccctctgccaccctccctctcccaccctccctctcctctcctgggaacagcggctgaatgggtgagctcaccctttattctcccccacagcccactcccaggaagaagggcagaatgggagggttatccagatgtctccagggggcccctgcaagtagggtagtgagtcagggacttcgtggggttggagaataccaacaagcagataacatgtcctgcaagtgagaggactagcaaggcaatgtggagggtcagagcgggtgggctagaatccctgagggtctggatgcctggatccttttatccaacccatgctcgctgggggcaggtgctggcatgaagcctctgcccatcaagctgcgaaatgggccaaggcaccctttttcctcagtggagaggggaaggggtatgcagggtctgagatgccaagcccaagctagagtgatggggtggtcacgggccagctttaaaccttcattttcctcctctagagcctagaaagaggcctcctatttacatagttcccaaaggccttcacagcccttagcccactccatctccacagccttcccctgcagggcatcttcattcccctgttgtgtagaaaaggagctggaggctcagagagggtgagtgacttgcccgtgatcactcagctaataaatgtccaaaggccgggcatggtgcctcacacctgtaatcctagcactttgggaggctgaggcaggtggattgcctgagctcaggagtttgagaccagcctgggtaacatggtgaaaccttgtctgtactaaaacacaaaaaattagccagacgtggtggtgtgcgcctgtagtcccagctacttgggaggctgaggcaggagaatcacttgaacccaggagacggaggcttcagtgagccgagcttgcaccactgtactccagcctgggtgacagagtaagactctgtctccaaaataaataaataaataaataaataatataaataataaatgtccaggaatcagagctcaaactcagatccttagtcttaaactccagtcccttttcttcctaactccaagaccttggagtaagatcttgtggctgtaggtatggctgatgccctgaagagttgaagttggcagggaaggtgcccagaaaattttggattgaagatttcatggcaagtctctggccagtggcctagcccgggtaagccatgctatgctcacctccccacagccccctctcgcctttttttttttttttttttttaccttgactggaagcacaagcagaaactgggacatgagcaccaggagaccagatttccatggtcccgttgggggcatggggttggggagaggttgcagaggagggctctggaggggagcaactgtcacagctgtgagaggtgggggtgagcaggcagtcagggctgttccctccagaatcctggggtgtcctctgcacttctgcgccaagctggagtgctagtgtgatggacaaggtggtaagagagctgaaagagcacgagcataacaagaaagacagaggcagaagcaaaaaaaaaaaaaaaaaaaaacagagggcaacagagagacagttacagagactacagtgatccacagagggagagccatccctgtgaattagccatcatttccctgtaaaccttagaacccagctgttgccagggcaacggggcaatacctgtctctctagagatgaagttgccagggtaactgcatcctgtcattcgttcctggggaccatccggaatgcggcacccactggctgttaccatggcaactgcctttttgccccacttaatcccatcccgtctgctacaagggccccacagttggaggtgggggaggtgggaagagaaaagatcacttgtggacaaagtttgctctattccacctcctccaggccctccttgggtccatcaccccaggggtgctgggtccatcccacccccaggcccacacaggcttgcagtattgtgtgcggtatggtcagggcgtccgagagcaggtttcgcagtggaaggcaggcaggtgttggggaggcagttaccggggcaacgggaacagggcgttttggaggtggttgccatggggacctggatgctgacgaaggctcgcgaggctgtgagcagccacagtgccctgctcagaagccccgggctcgtcagtcaaaccggttctctgtttgcactcggcagcacgggcaggcaagtggtccctaggttcgggagcagagcagcagcgcctcagtcctggtcccccagtcccaagcctcacctgcctgcccagcgccaggatggccaccatcacctgcacccgcttcacggaagagtaccagctcttcgaggaattgggcaagtgagttgtgcctcaggaagtcctggaaggcatggggggcggggaggtcagggtctctagtggggtgtgtgtgcctgcagtgcttggggagcattccttgtacacagatgaaggcaggctgcatgggtttgggggcacctgcctgtgtacagagtgtccagagtcgggcgtgggtatgtttgtgggtgcacagatgtgccaagctagccaggccagtgtgtatgtagggatgaagggttgacagtgtatgccagtgcacacacatacacacaaaatgcacacaagtacacacaacctggatacacacagattcttagagacttagggttaaaaagggattttcctagtcagctgggtccaaagctggaattccttctctagttttgcttgaggtggccatccgccctccacttagatacctccagtgacagagaattcaccagctcccggtagttcttcctgactttagacacccacagtgactgtacagagtggccaacttctccctccctacctcccctttctcagctcctgccaggagtgagggcgtcagtacagtaggggttaatatctgagcatgacaggcttcccgggtgttgggaggtggggagaggaaatcaggaaagctgtagcggggagcaccgctgtttcaggggctagggtatgaagggtgcagtggctctggacaagcaaagttgcccagcccagagctcattttctgccctgatgactgctgtgtagagaaggatgggaggatgaggaaagaggggaggcccttgtgggtggcccagtagggtgtggagtgtcagggagggattcctggatgtccccagctgggtttctggaggatcctgggatgggtcaagggttgggtgcattttggaggcagagtttgccttgtgggcaaaggagcaccgatgccctggttggtttctgctgaggcagcaggagcacggggggaggggccctggaggcaggtgtgtattggtgtgagttctgaatgtgtgtgtactagtgtgcattttgaggagtgatgtgtgtggctgtagaagggcttttgagggaaattgcttgtgacactggggtacgctggtgtgccctgccagggtgtgcaagcattcatgcatgtgcaccaggaagaggtgcttcgtgtgtaaggcctgaaaatgcaagtgtgccttgcaagggtgcatgtgtgtgagtattacaagagtgctgttggctgggttgaatgagaacaagggtgtaaacatgactcattaaatgtgcacatgtatggcaggttagagctgtgtgcacataggaaggcacatgtgtgtgaggtctaggggtgtgtgaggatgctcatatgagatgcggacacaatggtgttcctgtgaggtcttgatatgcacatctacgtgaagactggggtcatgcacacaggatgatgtacgtgtgtgtgcacacgcatgtgtgtgcatgtgtgaggcctgggctcacagggttatgtgggagtatgggtgttataggcatgtgtgagctcatgctggtgtctgcatatgtgtgggaggtggccctgtgactgtatacaggaaggctgcttgcacacacacacacacacacacacacacacacacacacacacagaggctatcctacaggcatgcaccacctcccttgagcacatatacccccatgtgtacgtgtgttcactcttatctgcagactttcagcttttctgaatgtgctttttttgcgggtaggggcaggaacaaaatgtttggggctgctctggaggactgaggctgtctacaaacttgtgcagggacccctctccaggtgttttccagtgctcgcctagaacccaagaattccctgattagccatgaagctgcctttcagggagtgaccaagactgggtcctggcaggactgcgtcatgagtacagtgagatggagttgagatgtgactcaagtgctcaaagtgaaaataaaagtgatgttttgccccaagaggagatggatatcattaagactgggttttgtgggggcaacttggtagagagacccttcgtgagccttcacagagaatttcaggggcaagggagccctggtgtggccatggcaggaaaaccgagggtagcaggcatagctaggccttgtttaatcaatttcagacttcttccttccagaaccatcagactgctcttaaccttttttaggtcacatattccttcaggaatctgatgaaagtctaaatctacgttccccagaaaaacgcacaaacctacgaaatgttgcatgcaatgtcaggagcttgcagggacatcgggaagactgtgtatgagcctaagtttgcagaagcttgtgttagagacaaggggataaagtggactgattccgcacccctgatgtctgtgttaaaaagtccagaccacatcattgaggagcctggggctcctgctctccacagcagcttcagtctgagcatccagtggtgcagggaggggcagtgccctgcgtagccactagggacacaggcgctgtccctcatcacccatagctctgtgacaccaggcaggctatgctacctctttacccccacctgtagtctggagataaaaagggctgtgagcattcaatgagatggtgcatgtagagatgcagcctcgagcctggcacatgacaggcccccagggccgattgctactggggtgactgttgttgttctcaaaggctgggcaaggctgaaagtgaggaatgggatctgcttgtaccttttgtctggagttggcccatccggggctgggaggaggttgaccaaaccgtgcttcccccctggctggcctcttctgtgggaggaagctatgagggtacctgcagggcccatccttcaattgatgatccaccgtccctgccagctgggacactgcagtcaccacccaaaagctaagcccccgttccagaacccacttcagatcactagcagggtgactggaaaaggcagccaggttggccctaaaagggcacatgggagcctttgggtctccttcaaggcgttgggctgcccagcaggagaggagggcaaatccctctggagggcttctggcatcctgcccagtgaggtctggctcaggactgcaggcctttgaggagccccggatagggctggctatggatgtgagagtagctgctcttctccagccctggtgggcagccctctgggaacctgtgactggggccagg

SEQ ID NO: 97 - DNA, 1220 bp, Homo sapiens
cctccccacatcatcttcatcctcacggacgaccaaggctaccacgacgtgggctaccatggttcagatatcgagacccctacgctggacaggctggcggccaagggggtcaagttggagaattattacatccagcccatctgcacgccttcgcggagccagctcctcactggcaggtaccagatccacacaggactccagcattccatcatccgcccacagcagcccaactgcctgcccctggaccaggtgacactgccacagaagctgcaggaggcaggttattccacccatatggtgggcaagtggcacctgggcttctaccggaaggagtgtctgcccacccgtcggggcttcgacaccttcctgggctcgctcacgggcaatgtggactattacacctatgacaactgtgatggcccaggcgtgtgcggcttcgacctgcacgagggtgagaatgtggcctgggggctcagcggccagtactccactatgctttacgcccagcgcgccagccatatcctggccagccacagccctcagcgtcccctcttcctctatgtggccttccaggcagtacacacacccctgcagtcccctcgtgagtacctgtaccgctaccgcaccatgggcaatgtggcccggcggaagtacgcggccatggtgacctgcatggatgaggctgtgcgcaacatcacctgggccctcaagcgctacggtttctacaacaacagtgtcatcatcttctccagtgacaatggtggccagactttctcggggggcagcaactggccgctccgaggacgcaagggcacttattgggaaggtggcgtgcggggcctaggctttgtccacagtcccctgctcaagcgaaagcaacggacaagccgggcactgatgcacatcactgatggtgtcaggcaccgtggtgcaaaattcctcttctggcccctccagtacccagagaaactggctgggccattaactgctgcagcaccaagggtggtagaaagagctgtgaagagcccccaaaccagtaccaggacacctgggttctcctgtgacctggggcacagttcttgccctctaggccttgatttccccacctgcaagtggggatgccagccctggctctgcctccttcatgaggctctggaagactggccaaggttgtggaggagcttgtgaacttgattaaagtgtcgtaacatggaagtgag

SEQ ID NO: 98 - protein, 395 aa, Homo sapiens
PPHIIFILTDDQGYHDVGYHGSDIETPTLDRLAAKGVKLENYYIQPICTPSRSQLLTGRYQIHTGLQHSIIRPQQPNCLPLDQVTLPQKLQEAGYSTHMVGKWHLGFYRKECLPTRRGFDTFLGSLTGNVDYYTYDNCDGPGVCGFDLHEGENVAWGLSGQYSTMLYAQRASHILASHSPQRPLFLYVAFQAVHTPLQSPREYLYRYRTMGNVARRKYAAMVTCMDEAVRNITWALKRYGFYNNSVIIFSSDNGGQTFSGGSNWPLRGRKGTYWEGGVRGLGFVHSPLLKRKQRTSRALMHITDGVRHRGAKFLFWPLQYPEKLAGPLTAAAPRVVERAVKSPQTSTRTPGFSCDLGHSSCPLGLDFPTCKWGCQPWLCLLHEALEDWPRLWRSL

SEQ ID NO: 99 - DNA, 210920 bp, Mus musculus
  misc_feature (1)...(210920): n = A,T,C or G
taggaaagagttatttttactttaagcaatttctattttttacatagttggtgtttttaaagtaggtagacatagcattaaacattattatcttcttttatctgccaaataatttgtaggctcataaaaataagataccactcatacaaaaaggaataattagcagatagtgaaaagaaatgaaattcttcaattgactgctatattccagtgtggtcttgtagactctgtgtgttgctgtgtgctagtttcaaagtttatggatcagaaatttaaaaaaaaaaaaagttgctcaggtttccatgaaaaagggaattccagactgatattcttaacacagaaatgtatcttactatagtttcatttatattgctataaatagttgcctcggccatgcagggagctgggtgggtcatctcaggattgttccaatgcagtttggatttaaaaaaccagattgtccctgagctccttcaagactgcacagaagctatttttagaaaggcagaagagctcagcacttgggaggcagaggcaggcggatttctgagttcgcggccagcctggtctacaaagtgagtgccaggacagccagggctatacagaggaaaccctgtctcgaaaaaccaaaaaaaaaaaaaaaaaaaaaaagagagaggcagaagaggctctgaaggtgcctagttctcctctgtctttatctcctctctgtggctcacttcaaaataggaggttccatgtgttgattctcatagtgaccctcagagaacagcagcagcggcagcagacttaaatgaccagttcttacatgcaagttgtgttggttatttctttggtatgttcaagtattatttctgtgtcttgatagggtcctactggggtcaggggagagagattcagtgagtcttgggcactctgtccaaatggctgtgtttcagcaaaggccctaaaccaggcagctgtgtctagaacacccattcatttttcactaatatacttaccctttgccatcatttaaagtctctcctctcctctcctctcctctnnnnnnnnnnnnnnnnnnnnnnnnnnnnnnnnnnnnnnnnnnnnnnnnnnnnnnnnnnnnnnnnnnnnnccaggacctcactttgtagaccaggctgtcctcaagagatttgtctacctctgctgggattaaaggtgtatagcaccactaccaccaccatcaccatttaaagtcttaaacaccgacataaacagctgagaggcaggccggacatgtttgcagtgggacagaaagtagggaagaacacaagctatttgggatgatgggaaagtagcttttgtaggcattaacatttaaatttggctctgcggttatagttcttaccaccttcccagtgatctaggaatgaatacattcttaacatgcctgtttttaatcagaagacagttcattcatatacgataatgttttcacttcagacagcaccccccacccccggctgctaacgcagtataaatacaaacattttcttgcccttgagaaaattcaggcctctcgagtgaacacagaaataaatggaaatgctcaagtgatctcagctaagctgaaccaagctaatcagtggcatggtgtttcctgacgcctccgctaggccacaagaaatgtgctggtgtcacctggctgtgaagcggaggtcaggtgtctagagagtgtggcacacctttctcactggaggccattcatccctgtggtccacagcatcagcctccagcatgtctcctctacctgcttcctgctagatttatccttctgggtatccatgtctttaccagcggagccagctaaatagagccttgaaaacagcaagtgggtggctggtaatgtggatgtccttggtttagctgcaaatactgtaggcaagactgaacttgggcgggcgtcgtaagaactagagacacctttgcaagaatccatggacgaaaggcatctgctccttctattcttcagaaaagagtgtttgttagcatctcctacgtcgttttttcaacacagacatgaaatggatggtcttcttcatgttacacttaacctatggcttatgatattgaaagtgatgcatgctgggaatatctcagtaagtacacatgcatgaggcaggaaataggcttttttttttttttttggccgtttctctcagtctcacagaggtaagccatttctgtggctttgatgttttccctctaaaattcaaataccaataatgttccgagattcatagagcaggctagataaaggtgactaaacctggggatttccccaggggagaactctaaagctttctggagggtgctttcttttacaaggtgacagaatacttaaagcaggaggttgcaaccctgtgcagaccgtgtttatagttgctctggccttggccttgttgcctctataactgtgggaaataaatgtctatcttgatgaattaaccagctgccagtgttattttaaggaagcatccaatagaccaaggcaccggtagccagcctcctgagaagtgtaacgccttgcttgctttacttgtttgttttgatgagtttcggcattgattcagagccctagcctatagcgcaggctggtggcgatgatggagagctgaccatcctggagctttagccggtctggatctcccagcagcactctccctacctccggctcccaagtcctggcattacaggtgtgagctacacgttcttgcctattttcattccaggattcgcagctgagctatttccaggtctcagcacacagctgtctgtcttagcattttcgtaaccattcagcagccaccatattggagggccgttcattgtcacattgaggtcacttgtggtagaagaaatgattccatggacctcgctgttgcttcagttagacacttttcaactgtgcctttttttaaaaagaaagacatttttcacccccggtatcacgttctgtgcaccatggattggaatgagaccccaggcaagatctgagcctgctcagaacacagctttcatctctgaagtcattggcttaacttcaaggggaactactttgaaagaccatcccatctcttccctctggatcaacttcctactgtcaacctgggttgcctagagaaacctgtctcccataggaaagatgctcccagtagaagggtacttagacgatgccagctggccctcgtgccagtggttgccctgaggatggcatttaaattggcatttacagcacttttaaaggtaggagttagcaagctgtgtatcatcctttggtgtgcatctggctggtggaagcataggttgttgtgctcagcatagcgacggagcactctgggtatcctgcatgcctggttagatgttccctttagagccctgtcctgccctggggggtgctcttacagtttattctttcttacacctgtgggcatcttttcagattgcttctccacacttgattcactctggctttaatttgcttcactatagctttgtaaaagcaaaaactttttaaaaagaaaaagatttatttatttaatgtatatgagtacactgtagctgtcttcagacacaccagaagagggcgttagatctcattacagatggttgtgagtcaccacgtggttgctgggatttgaacttgggacctcttcatactgagactgtgctggagttacacatcggaccgatgatgtttaagtctgactccacagtaggactcacagagaccgtcaaaaaaatatttcactggggtctcatccccgaaactgacaaacagcttagagtaagatacaggtagttggggtcaggagccacagtgaactcatttctgcagttgggaaaactggggcttggaaaagacacttgttaccccagggctctgaagttatagaagcagatgggtcagacttgcacccctgactctggcatggcctacatttgcataacactactactgctctcaagtcctgccttacccggatcgctctttaccttttccacgacacagtgttggtgtgtcctaccacctgcaccaacttagtggcctccactgccatttgaagaatggatattatgcaaatgttcatttctgctgtcttacagaagagagtctctttgtacgagcaatctgtatttgttagtagacagatccaggtctttctatcggagaacctggcatgccttgattttttttccagtctgctgtgttgggacagaagcacggggtcactttttggctcctactcagtactgttctcttgaatcagaaaccaagccatgaccttctctctcgcagtgccctttgtccagcaggaggactggggacaaaagatgtgtcttcaccttcccagggcttctctctgggtttccaatcctcccagacaacctgggaagcctttatcttcctctgctatgcagtgagcagctcagctaacacctcctgagaatccttcaaatcgttccccaaagaaaccactctgctgcagatgcctatatttagacctcataaagcccacatcagatttctgctgcctttctctcaccgctctaagcctgctgtttgaaaggcagcaggctcttttgtctttaaagttcagcactggctggctggctcccaccttgaactctaccgccttggaatgtcctaggacttcttcttccctcattctgaccaaactccaaaccacgggtaataaataacctttacaccatagaagtagaaacaatacaacagggctagaaaatatcttcccaacagggccacagctaagtgaacaagagtgtatttccacatgcctcaaggttcaattcatcccagatgcatttcactggttcactagactcctgtggcctgacggctctctaggtgtctgtccgagatcagagcatagttgatggttagtagcataagatgctatcaagttgaaactatcaagttcagtatcaaactgcatagaacaggattaaggtgttgacttggagcctggtttgggctttcgggtacatgcctttaattttaggaatgagtttgaggccatcctggcttatagcaagttctgagacagccattgatacatagaccctgtctcaaaaataaaaaaaaaagaattttttttttttaaacaggggtatcattgggattgattctcaggtctcccaattcctagctgatcaggttaattatttgacgggttatcacttacttcagtggtattcactggctggctttcactcacttgtctgtgtctccatggcatttctgctttctacctaaggagaaatttctttcattgtcactttctgttccattagttagtggtgatgccacccagagggacttgtctctgtcttctagttagtttagtagtcccagattcatgccgactgaaactttgtcacattctgtagcatagatgaagagaacaggtgtgtgccttcagaagttaattggctcttgctgagtcgcactcagcccatgaacatagatcctagatatccaagtggtttttgctgttgtcttttaaggagtttgacatgtacaggttcatatgcatatccaacattttattagggcacaatattgtcatcggtaaagttcacactcttctagagcctctacagaattccttcgagggaaccaagccatagagccattcccccacccccaatcttacaatgtttcagataagtttatgatcttgctttaggctgtatacattgctacccacggctcatggcactgtattcttgcggttggcttcacgtctggttgttttaaacaactgattggtgcatgctgtcatccttcggtataacactgcagcctgtgtcgtggccttggccttgcagatgaacctgtggttggttgcaagtttttgaaagcattagaggctaagaggaaagcaaggctatgaatatacacacttaggagggggcaggtgtctgtggtctttccgtgctcctcattctgtggtaccttgttatatagcctagcctgatgctctcagtttacctgcctcaagctgtcaacatattagcatctcatcctcttacgtgggcatcaccatacctggctgagctgtatttcatttttcttcttcattcatcctttttcagtcttttatttttataattttaagtatgtcccatatttacacacacacacacacacacacacacacacatatatatatatatatatatttacaaatacatttgcagatacttcctccagtctctcttgggtcccccatggctcctcttaaactcatcgtttcatcttctttagttattattcttacactaagatagacatatgcatataataacttggaaggatcaagctagatctgcctcctcttgaagactagccttcacagtactgaagggtgctctccaagatgccaagagagaaagtgaccgggagtcctacccagcagtgataacctatgaaccacaacagtagccagaatggtaagctatcccagagtgcaacaggagctcttacatgctggcgctgaccagcagctgcctaataggatggaattcatgctgtaaacctagccagctggcgggcacctacttcacctcccaaaccagtatgaccttgagctacattcgtaatacttactcttaacaggtgtggctctcacccctcgtcagagaaggctttttctgaagagatggagaccattgttgaaacgggcctactgatcaaagcccttttacaaatgagctatttcttggcattactttttctctttgtttttttgtttttgttttttcaaaacagggtttctctgtatagtcctggctgtcctggaactcactttgtagaccaggctggcctcgacctcagaaatccgcctgcctctgcctcccgagtgctgggtttaaaggcgtgcgccaccacgcccggcttactttttctgtatgctctgattggaatgcagagctactgaaattcacctcttgattgttctgggataaaattaagcttattataaataagatttctgctgtatttgcacttacatgcaaccagcacactgtggtgatgaggttacaaaacagatgttttcctcagtgtgaagtcctgacaatccccgccttcctcactgcactcagtagcatccttgtctgttacactccagaccccggatgcctccccccacctcaggtcccttgtatcactgctagtctcctggcagctgcttatgaaacctaacgtttattggactctcccctgctgctttcttataaattacagcatcgagtaagagacttgacacagcggcatctcttaaacatgagttttctaaggtcatctttcctcacagtcctcacttctggtaattactccccccaccccccaagattggtgtcttagttcaggttttactgctgtgagcagacaccatgaccgtgtcaactcttataaggacacaacattcaataggggctggcttacaggttcggaggttcagtccattatcatcaaggtaggagcacggcaatgtccaggcaggaatggtgcaggagaggctgagagtgctacatctttatctgaaggctgctagtggaagactggcttccaggcagctagggtgagggtcttaaagcccactcccacaatgacacacctgctccaacaaggccacatctccaaatagtgccactccctgggccaagcatatacagactgtaacaattggtattggatgtagaatagtctagaggcctgaatggacacccaggagaagagacatggttaggaacgttgctttaaatgtgactgactgccagtacattctccagttgcacaaaacaacttgtagggaccttgagacacacacactaggtcccagtcctgaggtgttcctttctctggttgtttcagaatcctcggctgcctttttcagtgtatagtgtgcttggtaattctcttttcctctcagcaatgttgtgcctctttctgttctatgtgtggggcacgctggcgctcacttctattttctccctgcgtgctgagaattttcgttttataaccacactcccagatgttaggcggggaaggagaaacataatttttttaaatatatgggaaaataatgaaggttgaaaataagatctgaagggagagcgtgaaggttgtccttgagcagtggagctcagggagtatttgtgacaaagcaggaaatccatggctgcctctctagagtggattgaaggtggagcagggttcatgactgcagtatccaaggaccaccagcagatggggatggtgatctcttggcccaggtaggatcaagcatcctctttaactcctcctcattatcatcactgaagagtggtaccatttgccaggctgatcccaagcctcttaaagggaagcaagcaggcaaagacttctggctctgctgtcgacatctctctatattcttgatccttaaatggagcacattcctggctgtcttagttcgggttttactcctgtgaacagataccatgactaaggcaactcataaggacagcatttaattgggtctggcttacaggttcagagggttcagtccattatcatgaaagcggaaccatggcaacatccaggcaggcatggtgcaggagaattctatgtcttcatctgaaggctgctagcagaatactggcttctaggcagctaggatgagggtcttaaagctcatgtccacagtgacacacctactccaacaaggccatacctccatatagtgccactccctgggccaagcatactcaaaccatgacactggcattcaagtgggaatttacattgagccttgggccgtggcacccctctatcttgggctgtcactgggtatcctagacaaggttgagtctgaggggtcatgggctttctctttttgaccattggattcaaaactgaatttcaaaaccagtgcctccaacatgttggagacattggtgaaaagaaaaaacatcctatgttaattaatgtgcactggggtatggattcgtttagtgagcagtgctgaggaggaagccagggtcttgtacctgctaggcatgagctcaggcagtccacactatgcctcttgagtctgtctcctcattgagggaggcagaaaaaaagtaacgggggctggttgaaggctgtagttcagtgctaaagggtaaggaagggctaaaagcagccttgacggtggaatgttgttctcaagaacaccagggcttccctgctctgtgtaggacaggaaggaggtctcggggcttcccttgccaaggatcagggtggtttagaatatgctctgtgtcactaagctaaaagccagccagttttagtgaataaaaataaaagttcctttggtctttatggggatgacaagaaatgtcccgagggggcattcttgctcccttagctattctttctaacattttttgtagccatttaggaaccagtcgggaggactgtccttccttgctcccagatactgtgtcactcattgtaaaggggggcattccaaatagctgagagactcagaggttccaggtcacctgcggcagactgtacgtgagtcttaaaacttggctgttaacttccaaggtgcagtttggctgcagggcagcattacagagcttgagttgttccctaggtctctggaatccaccaagttccgcctatagtgtttggccaggctgcctctgggatgagctgtttctgtcttccccacgtttgaattcgctcacgctttgagacaggcaggcatcagcaacagcagtttttagcccagacagctctcagcaccgtcagctcagcacagcttcagagggctctgcctggtgggaagctctgcagggctctacctgggcagtagctacagagccctcccctctcagcaccttgctccgcccactcgttccaggctgtcgattgccggtagggaaactggagagaccaggattcctcttccattcttgctgttgttaaggaaaacagaccaaccatctgcatctagaccagccttcctctccctcgctcccttttagaggaggttttcctgcctggaatctggtaagtgtgggcaaaggctctgtctcctttcttggtctgtgcagaacggtctcgtgttgtggatctgtgagctttaacctacatgtgctagaatttagaggagtctttgagcttacaccttctctcgcttatagtgctccttgaatatttttagcatgccttgatacctgtatcaaaaatatagcatattttttccattactgatgtgcttaaacctgtgtcatcttgcctgaagcttcttctcactgtacagcgcaaaaaatgattatggagatagttctctggtgccttccccatgaataaatgatgcatttgtcattgctgttttcctgaaatgtcaaaaatagacacagtgaaaggatctgtcacacagagttcagaaatttggtacaaaattctaggttgaaataaggacagatcttttcttttttaggcttcattatgtatttgttccgatttcaagcatagccagtgtggtcacctgggctgccacgggatacatatgttcctggatccctggagacttacttcctaggactcgatttgtcatagaccttcctaggaaactcgaggggacaagtcctatggctcccaactttagctttcacagagcttcacagatttttatcatttggctcttgtgtggagagaggcgtcctgtcaggaagtttttatactgagaagtgaggtgccctgcgactcagtcctttctcactagcgtctcatggttctcaatctgcagaagaggaactgttatcctctttcagagagcgtgtgatggacattttatatcttccatattctaagttacagaggacttacataaatgccatttaggaaaatacaggaattaatttcttggagtaagctgtctttccatgcgatcatttgcaatagcctgaacagtataggcagagagagagagagagacagacagacagagagagagagagagacagagagacagagagaaacagagagagagacagagacagagactgagacagagagagagagacagagactgagacagagagacagagagagagacagagactgagacagagagacagagagagagttaaaaacatattatatttcaaatatatgatttgaggaaaatggaattatataaccctgactggaagcccagggcaaggattcatttgggggacatacccatcaacgggacccttacaaaaaggctgagacggagcacgtgtggtctcatgggttagaaaaggaggaagttaaccttgggatagctttaaacacgccagaaaacaaaacatttgtcaggaatcttcaaaaccatgggcctttgtaatgtgtgaaattgaacttctgacccttcttacttcacggtgacttgttttccttgcaaattatgtggtgttgggcattttgatgtggggcaaacagaacggttgaattactatagggacgcactgttcttttggtaggtgacatgagattgtagagctgaaaccaccactaccaccaccaccaccaccaccaccaccacccatacacacacacacacacacacacacacacacacacacacaaagacatttgaaaattggtgagataaaaaccctagcactcctcatctgtgtataattccctccccgtcggctgctctgcacctgtggtaatgtttgtgcccccccaaaatggagcgggaagagcaaatagactctggcaacctcagaagaaatcagtgtcctattccccgagccaggggtaggggtgacctcatttcttctcctgcttggacactgatgtactcttcctggtgattcaaactgtgtgtttggtaacattgtttcaacttccagactctcgcttcttgccaagaggctccagcacctggttaatgatctctagggtaaatgactcgaacctggttgggactgctcaagtggaattgcataccctcctctggggacttcttccctgccagccgcctgcccacctgtgggaactgggcagagccagtcttctgtgctcgttcctgggtggtacaggcgaggtcgaactacaaatgccagagaagacagcagctacaagctgccctccagaggacccacaggtagctccaggaggagcggggtagtcctgagggccacaggctcccccagaggcggcagggtggtggcagatgatagtggtattaaatgattgtatgtccccatctgcatgtggtaactgcccaggtctcctgcaggcaccgtggctgccatctgttcttgttcatctttgattgacagtctcagtaaatggcagggctgtctcgatagcctttgtacttataggtcatggagaatgcacagcagtgtttccttctgacctaaggacagcaccggtgatcgctttatgctccacagggataccgagaataaggttaaagatagcgtttagagtaacaaataagacttttccccctttgtgatttttgaaagctatttattaagggtagcttgaggttgttttgtttttcagcctgcagtctgtcaggtgtgactggggagtgtgtttctcactggtctccgtggactgtggaagtactggtctcgctaaagaagcagaagggcagatatgaaatctggagacatttacataaagcatgtgcttcatgtgccctgtccagaggcatatgtcccttcttcctacctttaattgtgttttagagaatggggccagcagtaattgtgggtggccaaatgatccttgagctgtttggtcctctgcggcagggtgtgtacgggtccatcatgagccatctcagctctttctcaggccaagttctgcttcacacgggccaggttggccactagctgggactctgatgtttatcctagaagcacggggtagataggattaaatatgatctttttaacctgaattctttgttactagggaattatacaatgtatgtgttgcatgctttttcttttttaagcactaattcagctggatatagtggtgtctccctagagtcctcctatttgtggggtggaagcagaaatattaggagttcaaggtcattcttggctacaaagcaagttcaaaaccaacctgactacccgagacattgtctcaacacatcaaaatcaacaagaactagagagcatcataattcagtgcagccgaaggcaaaacattgatttcatacctttgttctttagtgactgtgttttatagataaactctggtttgtgtattctaataaagagcttcttgaattattttgttattttcagtgtggggggacatgcatgcatgacagttatgtgtgacaacacacatgtggaggccagaggacatccctagaagtcacctgtcccctttcatcttgtttgaatgagggtctcttgttcatcaatgtgtgcaccaggctagctgacccactagctactagggatccttctgtcccctcgttctgacgtgtaggagggctgagattcagtgtagtactcacctggctttatttcagtgtacggggccaaactccagtcctgtgcttgtgcgacaagtgctttactcaccgaccccatttcccaaccagtattaaaaactagtcttttcattcacattgaactctggtatgtaaacttatccgtggttgcttgcttaaagcggttctcaaatagtggcggttctgtcccgttcaccaacatgtagtagtttctgcagacttcctttagttgccacagtttaggggaaaagatgttggtgggaactgggtgggcacttgtgggttggggcttcttgctgttttcatttttgcatttgtgcaggaggcctctatcacgtacatccagcccagagtgtctggagtgctggggttaagagcctggctttaaagaatatgtctgggtggtctgttcataaggagtaaaacaggctctgtgtgtgtgtgtgtgtgtatgtgtgtgttggggggggggggcggctgggcatagttaataaagaaaaagagctgtcatcgatacagctttagggtaataaagtgtctttgacagggccaggaagatggctttggataaaggtacttgttgccaagcctaatggcctgggttccaccccacaacctcatgtagtagaaggagagaacttgctcccacaagtagtccattgacctccacatgcttgctgtgacaaccgtgggcccacaagcgaaagaaagaaggggggggggagggaggaaggaaggaaggaaggaaggaaaggaggaaggaaggaagagcaagcgagctgtggtagccacggccccacatatgcactagatagatagatagatagatagatagatagataaaagtaaaaagtttttaaaatgtctttccaattcaaattattggcaaagttccttattttaataaagcttgataattaataaaagtatagtaaataattacctgatatttttatgcatgtttgcatgtgtgcgcacgtgcattcgtgtatgtgtgtgatacttgggttgaaaatcaggaccttgcagcctcccactgagctacatgccctgccctgccttgacaatttcttgcaccagctgtttggagtggggcttcattggcacagagagaagcagcaagtgagagctctgactgtgggctctgcatctctagatggggcctgggcctcatctctcacactgtgagaatgtaaaaagcacacgtctgtggctgtcactgtgaggttgaggctgacgtgcaactctagaagcagactcagctcttagagctaattcagtctaacatgccccctttggggatgaaggagccagctccaaaaggttagctttccttttctaatcttctctgacgtgtgtttctctccctcctttcagttcttaaggcaacttcgcccgttaattaattcacttttcagttaatcgtgcactcatttctgacaccttttattgtcatgccgcctgctcttagaaatcttcaagattaaaatgttcacgcatgtgcttcttgactccttaattagattaaactggctctgcaaatgggataatggtggaggtacctttgtgtgcctgcctgtacccagagatgcatgtggtaaatttcagacccagagaagacatttgatgacctgatcagactgggtctgcctgagcaagtaggagaattagaaccaccattggtagtcgtccttcatgggaagactgacttgattctgacttgcctcctgcatgggtagctttccctgtatttgagagggccagcggtgcctgttactatcaatcaaggctgacttgtaaagaattgactctcgacaatgtttcatccaaaattctgttttcttttgacctaacccagctccttttttggtcacatgaatggcatatatgtgcaccggatgcacataaactactccagcccacttctggtagacatggcgattcccaaggtgtggctggtgttctggaataaacagccttgagcgggtgttcttctggcattctggtgggatttagtcacacaccctctcatcttggaaacaagtggtctctccagagctatactaagctccgcctacctctgtagagctacactatgttccaccccactctacccagcctcacagaagaggtagttctctgcttataaaacttggtccctgccccttgtttagaagactagagagggcttgcacatgcgacccagaaactgtctgattcctgtctcttgattctcccttcacacataccccactccattcctaccacagcaaatgtattctttctgttgtcttctaaccccctctgcctgctttggctaggtttgggtctagggaagtactggtcaaagtgcagaccatggcccagtagcagaacttgttagacagacagatgtcaggccctgcccctgacttgtgggttccaaggagcctcctataataagtgagtgtgaagaagccctgatctgatgctactttcaggagggaacacagcagtggttggtcgccaggaacaatgcaaacttttttttaaaacatatggattctcactttcctcccatgcatccatcctccagcctgctgtctgtgtactgcccagactttgcctggaaaggaccccttctctgaggggtcttttctagatagttctgtccaccggtgattcctgcttcatgcattcatctctgcttgtcttctctagccaccttggaagtcccatacttctctttactgtgtgcgtccccatagaatccacatctgtggttctggctttctttcccgaatgtgttctctgtagaatcacatctgtggttccagatccacagcttcaagcaatcagagactcagcagaaatccgaaaatatgtaagtgagaaaactgcatctatattgaacatgtctagaaccttcttccttgttaccctttcctcataactccagaatattattttccatatcactgatattgtatggagtataataagttctatagaaatggcagaagcttcacagaggaatttaacattaaatactgtggcatagcaggacatacaggctttgagcacctgcgtgtcctgaagccagcactccatgaacactaaagggacactgtagtctaattattgcctgtatacacatagaagcatgttagctccacagcctcgcctatggccaccatgaggtgagcactcgtgagcacaaacttattgataactgatattcttaggcttcggagtgtacttaaaagcttggttgtcaattattccttaagttatgcacaaacagacttgccagctaatgtgatgcaagtaatgaaatctttgtagtggtttgtaggatccagtattgttagtctctggattgcaatttcaggaggctagtcttggaaagtggcggcattctaagttgataagtgtgttccacacagtgagtgtaaggttttagtgtactgtcgtcctgtgttgataaacatatgcaaataagggaaaagaccactcttaatactgagaaacagatcatctttcccccatatgatatgctagctgcacccaaattagtaaatgctaaaatgactatggctgataaaaacattgcacaaagtctttttactttttatataattaaagtgagctctccacttgatcgtcatcactgagataaacccagtcttgccagactatctgggaagattaatgaatcagaccctaaaatcccataacattcgaaaaataactactgtgtactgtgacttattgaggatacaaagaagttcctgggctctaagatttacgtcaatcttgtcagcccggtgcaagcctccccttggagaagtcgactatgaaaagaccattgctttgagctacacggtgacctaagtgaagttcagctttcacaagttgcgaagtgtagctagatttatggcaggtctggccaccttgtctgcctgccctccactttccaggtgtgatttgtttcataatgtttattttgtttatggactttgcttaataagcaagttgtttatgtatgatgcaaaaggataagaaaaagtctcttgatgttctgatgctgatgttctatgggcgccttgacatctccacagggcggggttatcacctggtgatgccaaccaaatcatcgaccattcagacagacaaatgtgattcttgttgctttgatgagtgtttgtgtctacagtgacaggcagtggcataagagaattgcatgtatttgtgagctttggtcagtctttttttcaaattaggtgaaggtaagagtacacattctctaaggggtctttgtcttgactgaagggtgcagaggtcacatgtagaaagctgggaatccagaatgtaccatgcattgttataaaggagaagccatttggtgttttcagataaaaatggagcttcccagctctgaaactcagtagagtgcagtgagggataaaggagagactacaaacaaaacacaaggaaaaggggaaccctgcctcctaggggtggagtagaatgtaaatcagatgcaaatatccagtgggctaggaacaacttaggacaaggcttggactggggccccacagagatagctcatcatttaagagaatgcactgatcttaaagagggagtcaggcctcaggcccaggttcagcagcttgcaacctcttgttactgtggcttcatgggatctaacaccttctgattatctacactatcagacacgtaacagcaaagaatacctctctctctctctctctctctctctctctctgtgtgtgtgtgtgtgtgtgtgtgtgtgtgtgtgtctccccctctcccccccccccccgtctctctgtgtctctctctccctctctccctctcccccctttctctctgtctctctctctctctttgtgtctgtctgtctctctcctgtgtgtgtgtgtgtgtgtgtgtctctgtgtgtgttaaagaacatctaactagagctctaagatgtgttatgacattataggatcctctgtagaaacatatacctctttgccacgacaaggttatatgactgtttatcgcataggtctctaattcagtgaactaatgtggttttatgatcaccagcccaggtagtacctggacaattgtaggtcagtagaatcctgaacgatcaagcctgcataaaacactggcgatgagtcctggccacagctggctgaaaaaggaaggtaaatggagtcacctggcaaagatatttgccctttctcaacatgatagatgctatatttagaggaaatgtttgtggtgataatatttgaaagtttgttttgtaatcctagggagcttgggttgtttcaactggaggggtgtgggaagggagggaggggggagacaaagggacgggagtgtgtccaatgggagaggaaaatgagatgattaattggtacagaataagaatagaaagcacgtgggaagcagaatcttgaagtttcagggctctccgttagtcattagttgaagattttgctctaagagaactgatagaggcccacccacatccaaaaggaatttccagccttccctttagctgcaggtagaatgttctaaatatatcctgttctagcctgggttctttccttccttttcctgttccctttgctccggataagatcaactgcctgctctttgcctctgtggccattcctgtttccttcgctctgtgcccatgtcccaggatcctcttgtactggtccctctacaccagcagttctcagcctgtgggtcaccaccattggaaacacatttttccagtgtcttaggaattaggacactgctcagtagcaaaaatacagttatgaagtagcaatgaaataattttctggttgggggtcaccacaacacgaagaactgtatcatggtttacggcattaggaaggttgagaactactgctccacacgcccatgcaaggatgagtcttcttatacattcttacaccctttggggtacaagcatctatgagacggcttccttagttcctttctgtcctctctatgctcaggaccatctccctgtgagggtgctctgcacactgagtactggctgccctaagcatccaataggagcgtggctaaatgaaatctgtttgaagattacacaaagtctctcagtcagaagcaagcgttctcttaacttgtgtttacagagctgtttgtactgggctgctcattcctggcctcataaagaaacccttggaggacagccacactgcccatgaagtgcttagagatactatcttatagtttaagataggcgggagacgtaaatggagtccagtctttgtgtacgtacatggaggtgggatttgtttataatttgtttcacatgctagtgagatacattaaggcagtggttctcatccttcctaatgctgcgaccttttaattacaattcttcatgttgtgatgaccctcaaccatgaaattctttttgttgctacttcataactgtaatgttgccatgtatttgctatgtaaatatctgtgttttccagtggtcttaggcgacccctgtgaaagggtcattagatacctctaaatggatcatgacccactggtttagaatcactgcattaaggcatctgggatgtcaatcttgggaaaagccagccagtggattctaagaggcttgatgtcattgactccctgagtcctactccaccttctcagcatgtcaggactcgataggagcagtgctattgcccctctctacagtggtgttctggggactctatcaccctgaaacttgcctctgtattctggggtgtgcactagtatccacactctggccagccaccggggtctacaggttgcgtaaacagggtgcactgtagttgtttgccattcacttgaggtagagctctttcccaacaaagtgcattcagccggaaaggaagagattgtttcctcacaagttccggagaccctgaggaacactaagtggcggccaccagaagacttgctgttaccacagtgacatctttattactggcatttgctgggaaaagtgttcaggaacaaggcaagaactgtagaagatattccgttttctctggggttctggctttcattaggactggccagccactcggacattggtgcttgctttaactcctagataaattattagtgtgttaattgtcatgagtcagagcctctaaagtgtcttcccttaaagaggttgagccttcatctcaatctcttgtcgtagggtctaaaaatgggagcatgagtccaaaccctttccagatcataaactaattctgagttaatagagcgtaggcaagtgggattctatttgagtgttattttcagatgcctcgagccagattgggacctttagcacctcaaaagtccctgaagtgaggattaagagactagcagtcctgtggcttctggccttagatggccttctaagtaggtcagagcctcccacaccactctgggatgcatagacctcggtcccttcaacatccacttctgagactcgccgcaggaagctaagatgggctttcttctcatagagtgtgtgttggctgaacctgggagcacagtggcttccaaacaattgattcttctaattccggagttacccaaatgtgccctaaaggcttgtgccataagcttacatggtgacgcaagagcaggtccttgtccagaagtggtttaatctaggatttcaggtataagtgattggtttttggttttttgaatttttggttttgttttttttttaatggtgctggggactgaacccagggcactatggatgctagtagccaggcattataacgttgtgctatgtcctcagttccacaggctgcaattttaagaccaggcagaaatacgtacccactgcaggatttgctctggcggtagtttttcttctgtatttgttcctgttgttgttgttggtggtggtggtggtggtagtagtggtgggtatttatttatttatgacaggtatcactatttagccctggctaacctggaactagctatgtagaacaagttggctttgaactcagtattctgcctgcttttgactgtctattgctggaataaaaggcacacaccatcagcatatgctattttttttttagacttgtctgtgaacacaaccaccttttctagaatgtaacaggtaggctaatgctgattttgctgagatgtggcctgtgtgctggctagtttatgtctacttgacacaagctagagtcatcagagaggagggagccttaattgagaaagtgttgccttaagattgggctgtaacgcaagcctgtagggcacttacctaattactgattgctgaagctccagtggcctaatggataaggcattggcctcctaattagtgattgatgggggagggaccagaccattgtgggtagtgccatccgtgggctgatggtcctaggatctaaaagaaagcaagctgagtaagccatggggagcaagccagtaagcagcacccctccatggcctcgacatcagctcctgtttccaggttcctgccctgttttaagttcttgccctcactgcttttcttaatgaactgttatgtggaactgtgaatggaataaacccttttctctccgagttgcttttagtcacagcatttcatcacagtagtaactttaactaagcctacatccagactggaggcgacatctactactggcttgtttggagaatgccagctatgtgttcataccctgacttaattgcatggctcttaaaactttcatctgatataaaccatgtgtggtgtgtagacctgtaattccagccctcaggtggggcaggcaggagggtcaaaagttcaaggttctttggctacctagggatttttccagggtagcctgagctagagactcttaaaagttttgtttccctctgtggtagtttttcttcctgttctttggaaaacaaaaaacaagcaagcaagcaaacaaacaaacaaaccccataacattatataatatattgtctagactagggaaggtacctttagaattaaaggttgggggtacaaaatgatttggaggagagaagtttgtactgtaagaatttgaaagatagcatatctttcatagatagactataatacatagaatagaatagaatagaatagaatagaatagaatagaatacatagaatagaaaataggaaaagcaaaggacagagaaattaccagacgaaggtgaaagttaaaataggaacaaaacaaagccgggagagctaactaaactcagcagctggccagtggggaggacagcaggaagacagcaatccatacatagcaggggcccagaatggtgaccgagtggctgagcctggagaacagcattatggggaatggcagagctgctgcctccaggcactcagtgctttagaacactgtgactggttctgggaacccgagggcctcagcacattccttttgcactagaaataacagtgtaaacagtgccccctcccactgcgtgtacacacacacacacacacacacacacacacacacacgcctctctgcctggatgaattctgcacggaggaaagtacaagtctagtgtccttgtcaggcaggtgaggcccggcgtggattatgagcaacaagtactgtttcttattttccacaaagtcctttaaaacaaagtgagaaaggtgtgggggcatgggggggaggggggtcttgggatcctgagtttcaggtcagtcaagttctaaggcaagattctttctcagaaaaacaaacaaataaatagagttaggcaatagtaacgggaagagaaaggtttggacgtgtggtgggtgggtagtagcatttacaggaaagtgccgagcacagccctagccaacacacttaaaaacataaggctgattcattagcaaaacaccaatgaccaaaagggatccaagaagcagcagcctagagctggatagaccagtttctatagaagagacaagaagggcggctgagagcgagaggtcatgggaagagtcaggcaggcgggcggcctgggtttcctttattttcacttgtctgcttttagctggtgtagccaacctttaaggaacacaaagtttcagtgttacacatcctactggaccggaagacatagcgaggcacagaaaggctcccagttcacttagagaatgagcataattttaacctcaaatcttggtgctcctagggtggatggggagaggctcatgaagtcctaccttagctgaggagctgtttgtggttggtggctgctgggagtgggggcaggggaggggggcagagtcggttttcttcaaggatgctgtccctgaggggatacccattctccacccattctccagtagatggacctccaccgtacacatgtaaacagcgctagatgaatttggtaggctttatttatttatttatttattgtttttcgagacagggtttctctgtatagctctggctgtcctggaactcactttgtagaccaggctggcctctgcctcccgagtgctgggattaccagcaccacgcccggcaagcactggtaggctttatttaaaaaaaaaaaaaaatcacatgaacttgggagggaagagtggtggaggcgataagatggggggggggggataggcaatggatttttattaaaatgtattatgtgtttatgaaattgtcaaacaataaaataccaatacactttgaactatttttttaatggaactcaaaccaggtcctctgccagagcagttaagtggtaagctatcactgaagccccactgataacatttaagcaatgtagagtaatattatctatgcatgaagtttacaatagcttattaaccagtagatttttgggtaaggccaatacactgtagtcagtgtattacactgtacttgggagttaaaggacaggggactcttccagttgtcgtgggttgttgtacaaatgcgtcaagagatgtgtgcttgccaagacagcagaggccaccgactgcagagaacagagctggctgataaaggtcgtagatattaataatacaataaatctgaaaaaagcaaaccaggaggaagaaaaataacaaaggtgctcccatgtgcgggcgcgcgcacgtgtatttgtgtatgtgtgtgtgtgtgtgtgtgtgtgtatgtgtgtgtatttcacaacagcagatattcaaaagtcaaaactctcaaactgttttgattaaaattaggaatcaaccaagttcccgccccccttttacaatgatttaatattgtactgaaggcttgctgaaagggttgtgtgcctgtaactccaagatcctctaaggaagagcagtttctaaagcgagtaagaattgtcaagggggctaggtttaaaacacaaacaataaacattctaaagaaaatgtctgttctttcaaagacaaatgcatagaagtgtaaggcaaccattgatcttacttggggtttctattcacgaccagaaacaactcagtggggaaatggtttgttttctcttatagctctctggtcacccctcatcatggagggaagtcaggataggaattccaggcagaaacctggaggcaggaactgaagaagaagccatagagaaacagtgtaacagcttgcttagcctaccatctaggaccacgtggccaggtgttgcaccaccccagtgacctgaggcatcccacatcaatcatcaatcaagaaaatatgctttgcctccaggcaaatcttaaggaggcattttctcaatgaagaattcctcttcctagaagaccctagtttgtgtgacgttgacaattaattaattttttagcacaattgagcagttgtcaccttgacacacaaaagcttgacactgctaaaatgcccttcttgtttgtcccccagatctcatgttaatatcacaatataaagcctagtatgacttttaatgttccaccgtctgttttaaaagctcagtctccttcaaatatacaaaggctctttgaaaattcacagtttcttaagaaccagagtccctcagctgtaggttcctgcagaataaaacgagttacacgcattgaaccaaggaacgctcacaatttcaacaaagtaaaaccaacacccagcactctgtgttgaatcatagagtcgttgaccttctgtctgagactcattcaaaatcctctgggtggtctcgagcccggccattccttgacaggacacatagcttgtctcctaggttcaggccagctctactctacagctattgctatccttgttgctcatcccacagtcctggcatctccagaattctggtatctctgttgctacatggctgtcccttcaccaatagccttcctttgggctaccttcaggtactccgaccatgtcaaagcattccacgccccatcttctctgcatgactctttcaatcctgaggtatcaactgcgtctgaggctgcatccacaactcccctgatctctcacagtgccaatcttcagacgctctccctgtcttcaaaccaggaccgcctgagacactcatacacgttaccagtttcagctgcggacacaaggcacatccttggctctcgatagaccacagctcctggtcgctgaccccgagcaaccacttcttagatttcatctcaatgatgctggtctcttcttaatcgccactaatttcccagccccagtgactaagtctgattgtcctaacaaagcaaagaattcccatgagtggttctgtggttctgtggttctgggctcttcagagttgattcatcagtcccagctggccagaaccactgatcctgaattcgaatggtcccagtagtcttgaagggactctcaaaagtccctctgaagcctcacaagtcaggctccatcttctgcactgctctcaacagtcttctctttcaggctcttacacaacagcccattaagctctgctcactcggtagctgtaagagcccactcttctgagcacctccacagtccttcccacggtggtcacagcgttcacatcccacactcctggtgccttttctgtcttcattttctttctgtcagtgtgatatacaacatgacaaagcaacccgggagttttatagtttacaggtgtactccattaggaaaggcggtcaggacaggaacccaagggaggaccctggaggcaagaactcaagtagaagccagacaggaacaatgttcactggctagttcaacctgctttcatatactgtccaggaacaccacttgcccagggttggcgccaccacactgacctgggccctcctacattaaccattaaccaaggaaatacccccaacatatttgcctagaggcagtgtgataagatcttctttaaactgaggttctctcttctcagatgaccgtagcttatgtcacgttgaccaaaaataataataaaaaaataattaaaaaaaaacaatcagtataccattccaacatcattcttagtgaaaaatatgaaataaaacctgaagggatgaaactataaataaaacaatgaatgtagttaacgcaaaattcataagtaaatttatggagatccttttaggaattgcagagtgtttttttttaaattggataaaaacaatcctggtgtttctatcaaaggataaatgcataattctggggagaagccaaggtgaatgtgagggaaggaaatcaagtgagcacagaatgtgagggaaggaaatcaagtgagcacagaatgtgagggaaggatgctgagaaaggttttcatggtcaaagccacgtgggatagattcaaggtccaaagaattcggtggaaccaaacagagagtgcgtggctgtctcactgggcaagggatagatggatgcacagcgttgagaaaagcatgttgctatccggtggacagagcaggctccatcatctcttcatctggagcgggggtggcaggaaggacgcagggatgattctgtcagtgtgatctgacaagccccagaatcttctgacccctagccgcatacagacagtttttaggaggcaaatgtaagaaactgtaaaatcgtgctgtgtgggaggacttgggcaaaatttaatgcgggtaagacagtggggcatatgttaagggaaaacccttgtgtagtagaagatacatgatttaagtagagagagtagtaatggtctcccatccaagtgctaaccaggcccgaccctgcttagcttccgatcagatgagattgtaccagtaacttagaaatggataagaacagcatattcaaaggaaaggtgagtaaggaatctattaataaacatgagccgagtgtggtggtatgcacttataatcccaggctggaagactgcaggttggctgaggaacaagactgactcaaaataaaacaaaatgtgtaagccacagagaatagatgcagacaaccggcaaacctatttaaaaaaaaaaaaaaaaaaagttcctcttgctgggaagtacagagtaaaatgaggcactgcttgaaacccatctgactggaaaccgtagcaaagtagatattgccatgatgctaattgtatgagtgcaaccaaaagcctagcagtcatttctattatcacatttatatatttaaggaggggagtgtatgtgcatgtgtgtatacatgcatgcccacctgtgtgtgtacagcttgtgagagttggttctcaacttcagcgtgtaactgtgtttcacactctggttatcagccttggtggaaagcccctttacccaaagaaccatcttactgttcctgacaaacagtttgagtggttcatgatttcagatgcttcagtccatgggtagctgtctccatcacctggggccttaagcaactctgaaccttgaggaagaaggaggaggctgctcacctcatgatggaaggcagtagagccatgccataccctttctttcccttttgctctgtctggggcccagcccacattatgcctccattggcagcacacccctccccggccttggttgatacactaaaaatgtattcacatggaatttcagctctgcttgtgtaacctcccaggtgtcccccagtgaccaaggttaaccatcacaatgtggtaagacacctggctctgttgcaaagcagaccacagcgtctattacaataaaattcactgatttctcagcagctttcatccccgtgtcttttagaagttgcacacacagtgctatgtatagatagatctactttgccgttttagtagcacaatcctgacgataagaacggctatcggttgaaaatggccagcttatggaaatttcatgttctgtaactcgtcctcttgaagaattagcatagttctgggtcagattggctttgatctcatgagtccaagcatggggaagagctgggaatgttcctggtctgagccggggtgtggagcagaggctgatgcacatggcaagggacaggacagcaggattgccaaacctctcctccctgccagactaacagctgagctgctgctaccgggctggcttgcctgtcaaccgcatccacggcttccctgcggaggaagctgtagaggcctgcggtttgaggttagaaatcctggctcctttctcttagaccgtgggttctttttttcttattccagcatgctcttgagttgatctcctgatatcccccctggattttctgagcatcttaattaaatgtctctctctctctctctctctctctctctctctctccctgtctatgtgttgctttccagcatgtgaaatggcttgtgtgtttttcaaaatcccgttaatgtagcttaggatgctatcttacatctgccctatcttgaaaacccccatggggtttattggtgtagctgtggtttctgaaaaaaaaaaaaattactagtcttgaatcttggatcaaacctgaaggttcccagagtcagactaggcatacagttagttggtaaagtgcttgcagtagccatagtcccctccccaccctcgtgaaaacaaaggtgggactcctaatgtgcacctgtaattctggttccggtgaggtggaggcaggaggaaccctgggacccactgaccagcctagccttcctagtgaacatcaggccagcaagagaacgtgtgccaaaggagcagatgtatgacatttgaggaacagtggccaagggaatacatgtacacatgggtcacccccccacacctccacccctctccacccctcccnnnnnnnnnnnnnnnnnnnnccccagttaaaagagcaagcttaggtacttgagactcaagggcttctgccttttagtccactttggtcaagaacgcatgatgaggttcaaggtgatgagagcatttttagcgcaaaccaggaagcagaaaaggcaggatggagtgaaaggagatctatccttcagagcctggcctggtgacacgctccccaaagctgccaggcttccacatagcacaaccctgggaagttgcacactagctcctactggctgcagctggtgctgagaacagcatctctcctgtgcttgtattaccctgatttgtcactcctttgccagcctggatgggaaacccatcacttttatgtctttaattagttgaagtgtccagtactcttagtgctttcttatttcctttctataaagtacttgcttgtagctttttgtcccttcccgtctggttggttgttaattttttattggttttttggaccacttctttatgcaagcttgtctcacacccaatgtattgtatatatcattatgtagatgtttaacattgtgcttttcagtatatcccttcagtagagccttggaacattaacgattatagcattatttgttcttgttaaagataaaacggggttttcccctctcaatggaaaaattacagacgtttctaagtctaaacacaaagaaggaaaagattatcaactacagcatcattgcatacctgagcagcttctctctgtttaccttttgggaggaaatgtgggcttttctgattgcccttgtaacattgtaacttactccaccaagtgatacataatgacattcggttttctgggtgttcctcatcttattttatcatgtctgctggaaggttctagttttgtttttgttcatgttttaagaaagtggggaaagatgtgaatgtctttgggcaaacccaaaaggttttaaactggattttgtttttgtgttttgttttttgtttttttttttttcctcttggaaatgggatgactaactaaaaagaattttgagatctaaacacgtttcctatttatgttcctgtcagcataaagagtcattggacttcctttaaaaatgaggcactttcaggagacacattcagaaagaggcaggtctcaaaatgaacttgaaaggtttaagtgggagaaaggccagtgggagagtcctcagagtgaggtttagggagcaggcaggagccagggcccctcagggcggtgtggactattagaaagaatttgtagttttatggttgagagtctccctgttgccagaaatgggtgtggtttgctatcttttattgttgcaggtgagagtggcccctggctagttaggaggctgttgcattagcctagggcgggtgatgatgtcttcaacaccagagtagtggtggcttcaggtgtggaaaggagagagatgggggctcactgggactgtagagccctttcagctgatgggctggatgtgtaagtgaaagacaagaaaagagtgtgacagccccttaggtgggggtttggaggtgggggtggggtgcaggggataggcggcagaacctaagatctattgaagttctttgctccttagacttccaagtacaagcaagctgagagcctggccagtgtcgaggggacatcatggtgtttgtccatgtgttcggggttctagctaactgtccttgaaaactcaaaatcaggaacatagtcatttcccaaacgggaacatatctgtaagctgccaaaggtttcggggatacagatttggaggccatacgctttggacagagcagtgtacagccttgtacattgaatggtatttggagaatccagggtccttttcctcctctcggtaaaaccataaccttcttttgatattttcataagtgcctaagaacacgatcatgggaacctgcgaaggatgtggttacacatatatcctcttttatagttaggcattggagcagtaagctaaaccaagacaggagagtcttattggaaggcctttgtgaagaaattgaagacccggggtggcaaagctattccggtgttacataaagagttgggcctgcacaagtcatccttgttctgcttcttcctcccccagccagtgtcccagtttctcttcttctcctgtagctgattctgagcaagacagaaacttgggcttttgcattaagcatccgagttctctctccccgggggattactcatccttcacgaagtgacagtacagtcatgtcgccatttttaaataccttttattaaccatagcagatacaatgtgaagataaaaggcaagcctatagatcccacacatcctataaatccacgcagcccgaaagagagaattaattggtcgccaccttgttacctttccttccagccctttggctgtgtttgtaattagatatatagtgacagtttgtgagtttgacataaacagtagtttatggtaaacatttcatgatagcttatgtttttaataattcttagagactacatattataggttaaatcatggaggctttttagggaaaaaattcctgaaggtttcactagttggcagatccttttaagattagaaggaaaataaaaacaccaaacctgaactatctttggtatactaagaaattcaaattttatgttcttaagatcttgttttgactcatgtcactcttaactattcatattcctttaggatatgctaactaaactttaattatcttttaaatatactttttccatggttcaagagatagacttagtgttgtgagcttcaggaggcttcagaaagaccacaccaggccaaacagttccacatgaggtttattgagggggggggggcaaggtggtggcagaaagagaggtggggggggcaagagagagagagatatcagaggggcctttatatatggatggtgaggtggtcgcaggtaaaggtgggaggtgagccaagtggattctgggaatatggtggctattgccttggcaacaggtgtgcatgtagcacctatgtgatgtcacaggtttcggaggtcctgatgccaatacttagagtttaagagcacttgctgttgcagaggacccgggttcagttcccagaagccacaccagcacatctgatggcttctcactgactacacctccggttccagaggatcccatctcttctggtcctcatgggcatctacatggtgcacacatgcgatacttataaaatagataaatcatgaatatacaccttacatttcaagggtgtgtgtgtgattgtaaggtatatgtgtgtgtgtgtctggataacagtttgcctcttaacattaagatagaaggtactgggctggactcatttcatgaaataccaacgagtctgtcttgcaagcatgagaacctcgtccatagaatccacatttagcaagtggtttgactaataatgtttctaagacctagcttataaacaacccagttgtctaagaataataaacagtactgagcaggtggtttggtatacatcaggagtgcccacgagtcatccaaagctgcacatttaatcgcagataatacagataggtgggaacatcatcatttaaaaatgtgcactcctgaggattgaacactgggccaagtacattctaggcaagccctttacctccttttcgttccctctcctcctcctccactttgtatatgtgaaaagaatctcagttccctaggctagtgttccggtccctctgcatcccaggcagggctttaatttatgatcctattgcttcatcttccacaatgcctgggaatagctctctgcgttttactgttataccatagccaggcagcgtccgtgtgacttttaaataatactttgaaatgtcatctggaaaagaactgtctccaagaagtaggcaggaaggaaggcttctggctggcccttccgtggcattcccaggtgtccttcctggggcctctccttggtcagagaagactctgggccatgccgggaaggattgctgattcttttcctccaggtgctgactgcgggctgcccgtattgtgaaactgaggcagcatcagtctgaagacatcagctccttcctgtttatcaggtctggagtccttgcttttctcagcctggcatgtgcctcttcagcttccactggggagatgcctccatcatactccttggattcgtccctatccacagctatcctctgattccttctcccatggttccaaggccaccaccaccacattctgctctaggtcctgtcccttcaagaagtggctttatctggagccacagttgcctcccgggtatactgcacagtatctgtagctgtcctccattctcatgcctatgaagacctgctacctagggggcagtggcagagatacagataaacatcctacagtgcacaagccgtgccctaccaaagccaaccaagactgacacagccccaatatccaggctaaaaggctaagctaaactattttaggcaggctctctggcctgctgtgcccccttggttatctgaggtcttgttcacgtcatctttcactgtagtcttaagtaggggcactgtaaatttggggaaacaaaacatgggagatcaagctagtaggaatatggctatcactcttgtgtatagcaaaattgggctctagtttcttactataggcaaaaagaattgggtatagacttctggccactactaattaaaaacttttttaaaaatgtcttatagctgggcatggtggcgcacgcctttaatcccagcacttgggaggcagaggcaggcggatttctgagttcaaggccagcctggtctacaaagtgagttccaggacaaccagggctacacagataaaccctgtctcgaaaaaccaaaattaaaaaaaaaaaaagtcttaatttaattctgagattgttaatgactgcattgaagaataaactggtttctatggactccaaagaaggattcagttgacctgggaaccatgtttgactgaagtggaggggaacatttaatggagaaaggtcttgcccttttcagagtgaggttattctgcccagctttccagatggatcctggagtgaatgaagtgcaatggtgtgagccaggagtccacgtggatggcattttcatcctaatacatagcacgagttgtcacttacctaacatttgccagaacagagtcccacaggctgattggcttcagtatcacacacatttcccttcttagttctgcaggcctagaggttattaattaattaattaattaattaattaattaattaattttagaggtcttaaagtcaaggtgtttgaaatcagggttggttatttctctctctctcctccttagatggcaaaggccatcttcttccagccttcccactgcctgtgtgtgtnnnnnnnnnnnnnnnnnnnnnnnnnnnnnnnnnnnnnnnnnnnnnnnnnnnnnnnnnnnnnnnnnnnnnnnnnnnnnnnnnnnnnnnnnnnnnnnnnnnnnnnnnnnnnnnnnnnnnnnnnnnnnnnnnnnnnnnnnnnnnnnnnnnnnnnnnnnnnnnnnnnnnnnnnnnnnnnnnnnnnnnnnnnnnnnnnnnnnnnnnnnnnnnnnnnnnnnnnnnnnnnnnnnnnnnnnnnnnnnnnnnnnnnnnnnnnnnnnnnnnnnnnnnnnnnnnnnnnnnnnnnnnnnnnnnnnnnnnnnnnnnnnnnnnnnnnnnnnnnnnnnnnnnnnnnnnnnnnnnnnnnnnnnnnnnnnnnnnnnnnnnnnnnnnnnnnnnnnnnnnnnnnnnnnnnnnnnnnnnnnnnnnnnnnnnnnnnnnnnnnnnnnnnnnnnnnnnnnnnnnnnnnnnnnnnnnnnnnnnnnnnnnnnnnnnnnnnnnnnnnnnnnnnnnnnnnnnnnnnnnnnnnnnnnnnnnnnnnnnnnnnnnnnnnnnnnnnnnnnnnnnnnnnnnnnnnnnnnnnnnnnnnnnnnnnnnnnnnnnnnnnnnnnnnnnnnnnnnnnnnnnnnnnnnnnnnnnnnnnnnnnnnnnnnnnnnnnnnnnnnnnnnnnnnnnnnnnnnnnnnnnnnnnnnnnnnnnnnnnnnnnnnnnnnnnnnnnnnnnnnnnnnnnnnnnnnnnnnnnnnnnnnnnnnnnnnnnnnnnnnnnnnnnnnnnnnnnnnnnnnnnnnnnnnnnnnnnnnnnnnnnnnnnnnnnnnnnnnnnnnnnnnnnnnnnnnnnnnnnnnnnnnnnnnnnnnnnnnnnnnnnnnnnnnnnnnnnnnnnnnnnnnnnnnnnnnnnnnnnnnnnnnnnnnnnnnnnnnnnnnnnnnnnnnnnnnnnnnnnnnncacacacacacacatgttcagatgcatacacatttgtatggaggccagagaacatcctccagggtcatttctccagcactgtccaccttgacttttgagtcaggttctctcactgaccaggtaatctggctgtttcaacttcctcggtgaagggattacagatagacattaccatgcatatatgtatatatatgtatatatatattctgaaggatggagctgaggtcttcctacttgcaaggctaacactttggcatttcatgaaatgactccagcccagtgctttctatgtttatgttgaagaggtaaaccacccctccgcccaacacacatacacacacctacacccctaccttacacatctttttaggcgtgtttgctcacggggatttgtgattcctctgtggcttctttagcttgtgtctccaggctcctgccttgagcttctgcttgcgtccctccgtggcagacgatgagcaggaagtgtaagggaagtagacccgtccatccaaccacaagttgctttggttggtctctgttttatcacaacacacagcaagccaaggacaggtggtgatcaggctgcccaaactgagtcatgtacacagagggcaaggcagtgagcttcaggctctgggccccttgagggaagggggactgggattgtgggtgtgtagtcagaactcacctttcctgaaatacccagtctcacctgctgtttcttttcagtgcactagtcataggatggttatttttgtagctgctttaagctctctgagagccaggaagttgtgatttccaagctgtttggtatagggctcagctaaaaggacagaacaaaagctgtgacctgtggatgaagtgcccagagaaccagtgctctaagcaagccagacagaccagagattatgtgacctgtgctcgcatcccatacaaggttcaacaaccttagaggactgtcactcggagagaagatactgtaaaaacaagcacaggtaacttgactgtagggcactgggtaagaggatttcagctaattgctgagctgggtggagataatctagccttagctagggactgggtggagcttggcttgagtccctgttcccaccaagaagcattctggtcgagctgttgctgaagtgactcatcagcctaagcagctagcttctgggaggctttctcagatgtgttaaaacttgctggtgttcagagtgcctccagaggtgcgtggtgcatacactactttggagcaaggaaggcagaagaccagacagggtgccctagggttgcccaggtagacttctatcaacaccagtccaacagcacacatgccttgtttgtcttgattctcgaggacaaccacaggtaagaacaaaggcaccactgtaagttcgttgtgtgggtgtacggcatccactggcacagagcatgatttttgtcgtaataccgttttcctatcggtgatgttaccctaacacgtaccaagagttcccattgtaaatgtctttgagggttatggagagctagtgggatttttcctcatgtgtaaaagggttggcagacaaacgtaacggcggctatgacacgaaccctggtctgtttttgctttcttttctgtcttgacggtttagaaaaatgtatagtgttcatctcctaaaggaacacagggactgggtgtctttatatcttggtgtcttttatatctaatgaagagggtcacagattaaatcctgtgaatatcgttctctgatttagaagttgttgttttgggcagaacactcacaacccttcctgtcatgtgttgaatccctattcctgtgacgtcaaactggagaagagggtagtaccagccgtccttggcttccagtgaaattccatcttaggtcatgtagtggtttacttgggagactcgtagtttacattcagatccttagatggcagtcttagaagtcttacttccgtcaggacttggcttatgtaacttagtgtaagttactgaatttataaaaataaaatttttgagagaatcacagtgataggccagagcacattcaactgaattattctttcgtgtttagttgtcattcctcatgtgtgttactcatgcatgcaaatcctcggtgtgattaacatgtgatatttgtttctttaccgtcccatttggtgattcataaactgttagtttagtagtgtatctgtaagcctggaatacatgagtgtgggccacgccttctgttaatgagcctggttactttccatgggtattctgatagtgttgtgttaagacagctaggaggattaaaggatgtggatggatccaaaatgggacgtgttaaaagctatagtcaggacaccactttatttcacattgaaatgtacgttgtctatatgcatttgaagtaatttctggctaaggtgagcggagtaataactgaacttatataaagaaaagggaaataagcactgtcagagatgtgtggaggacatgattgcccaggcaaagctgaatccagtgactgtggtatcaggagatgagggaaagagggtttctagttaattagacaagagagaagagacaggagctgcagtggcggcggaggtggcagctttctcatgtgttttcacggcccctgttttcaggaaaaattggcttttctactcaagaagactttgtggagtcagtcttgcaactcaatgtggattttaaaaccacacatttgttcagaatgctgggttgttggtgttgggaactgttcaagaggagcggatgcaaggcaggagttccataaacccttaagaagtatggataccatagcccagaagggctgttggctggcctgagatgctggcattcctggtgcatggaaggggacttccttgctcataggtggtgtttgggggtagaggactggcttggttttctctatttcattccaggtgtttttcagttttttgtgtgggtattttgttttgttttgtttttcattagtctaaacctgctagggattttccaaagtagttttcaaggtcaggtatttacgtagggtggcagagatctttcccctggagttggctgctgctgacgtcattttgtacttatgcagagggctcacttacaggtgggccacctagcatccaggtttctgaggtcactcaccttggagccacagcaagagcacgtgttctcagccctgtgggtttttttttcccccagaatatattgggactgtgtccctccctggtagctcagaattccacagagggccacttggcatgccctcacctcagtaaatatttgtgtttcacttgttcctgacctatttggattatgaggggcacagagggagcacggatggacagtggacagtcaggtccccagagctgtaccatcccccaggccagtggttcttaaccttcccaatgccgcaaccctctagtacagtttagtttctcgatttggtgaactccagccatattattatttttgttgctacttcataactataatttggctaccattacaaattgcaatataagtatgtgatatgcagggttatctgctaagtgaccaccaaaggggtcacggcccacaggttaagaaaggctgcctaggcacaaatgaagatccccaccagcagtcttgaaatccaaggagattgttaaccacctttcttgaaaccctggcatcacccttcttcctccccgaagtgggcagtggttcccagaagtgaatccacccaactaactgtgggacatagtcaggtaatcacagactacctgcttccatctgagacacaggtcagctgctccgttcacctcagttactggaagaaggttcagagtctagctgctgattgacatccctcagccccgcccccatctgtccctgcctctgaaaacaaaggattgattttccttctagaaaatggaaaagagtgtggacaattctggaaaaccacatgatatgctccccacatcccaccccaccccaccccaccccacccccaaccaatccctggcagtgaagaatgggatttcagaccaagtgaaaatacagacctggcagattcaagtatgatcactggccagcactcactacctaacacagcccactttcagtgatgtaagctgtcttactcaccagctcttactcatgtggcctgctgcaggcagagagaatcacatgcgattataaacagcctcttctgaccctggtcagtgactacaaaccttgtcacagaattggaaggcttgtgatcgggaattcctgggcagaggcctttcagaatcccggggacatatctttgggacctttgccagtgtagaggtttgaaatactccactctattatcaggatgtaagcttcagagtcaaggaagcctggcattgtaagggctttgtcaagtgtgacaggcctctagagtttacctctattctacgttctaccctgttttgttgaggttttcaatagaatgagatctgaggtcaaaggagtgaatgttttacctgagatagatttgttctgtctagtattgtatttaagtaactaactcactgaatacatagtttaagcacttgccttgctcattgcttaaaaataatttctttattattcctgcacttcagaatgaatggtaactatcactttagctattgaggaatgtatctcttacacttgtcagttttttgttggactaatattcttttaaattatattctattttttttaacttggtttattttatgtattagtggtgctacagcagtggacagagtgaaggtatttctcaaagacttcatttgtaagcctaatcagatggctggtaaagtaggtggcctgcttttggtagctggtctcaatgaattaggttgcttcttgattccttgttggtgggaaatcctgcaggccaggccgagtaattctgttcctgggtatgtcaggggagcctccttctacaaaagaaaagaatggtgacaggagctggtgaggacgagtatctaagacatacagagaaacgggcaggagagaagaagacacgagtcaaggccctgtcacctcctgttggaggtgagactccccagagaggatgcattcatttcttcttaggaaaagcgccataaaaacttaatgctgcctgtgactcggggttagatgattggatggtaaagctccatagctttgcccagttatggaaaggaatcgcagaagctcacagcaagaccgagctgaagagcggtggcacacggtgcagcccacagccgctgctctagcatcctcttcttctgcctgctccacggcctcctggagttgcctaatcctgggtcctccctgggtgataattaagttgttggcttgttgtgtttatacggatctatatttagctctgcttatctatgtttggggaaggaggactcggagaacaaaatcaaaagcatccccctgagttcctaatggagaaggcaccagctgagagtgtcagcggcttgcttccaggctgtaaggtgaaactcactcatttctccaacccatatgtactgagtcctctggggttcactcccagcacaggtgttggagaggccacgagctcattagggcctgagccagggacttgcctctctacctgcagggaactttcagcctgctgggcctgactaaccataatactcgagtccacagatcatatacttatgatggggttaagagccataaagagaagcagtctaggaagggaatggcaattacacatgtgggtgtgcttctctaagtggttggggtttcttctgtctggtagctcctcctgttacccagtccagctggtcacgattagaatgtaagtgggggctgacactaggtttgtggtcggaagcctgctttttaacaaatctctaaaaggatcgctcccagggaaagctgtaagatagtcttcctggagagtgaatggcattgatcttagagcagaataaaaagatgtttactgggaaagcaaattctccatccatcccagaggatactcaagaatcatnnnnnnnnnnnnnnnnnnnnnnnnnnnnnnnnnnnnnnnnnnnnnnnnnnnnnnnnnnnnnnnnnnnnnnnnnnnnnnnnnnnnnnnnnnnnnnnnnnnntagataagaggagagacagccagaagcatgtggaagggtccagactgaacaaggccatgagaggagggggaggggcagcaagcaagaagatgagaagagagaggcaagagtggggaccaggatccaagaggggaggatcaagagagcctgtggccagaatatatgggaaagagaagctgagggaagagaagggaggggaggggaggggagggaagagaagtccctgaactaagagaggtttagggtaggggttgcgtgggaatgagaagaacagagcggagccacaggtgcccactgagtcttagatgggcaccacagttagccatttgtcctaagtttcttttgggacctggcacagaggactctggatctcttcgtttatgaagttgtgttagatgaggtgacctcagagccccggttttccccttagggttagtatccattgccacagctactgagtctagcctggtaacttgtcactctccacctaaaggataaatgctaggagagaagcaagtgggagtccacaaggagagactcagctctgtcctctcctgaactaatgcattcacacacacacacacacacacacacacacacacacacacacacacccgctggaaataaataaaggaagcttttctcatctctttaagagagcagtgaccgtcatctcaatctaagcatcaacaagctggcagctcctcaaagctggcggctttatggggctggagtgagagtcgaacctgcacacacacacacacacacacacacacacacacacacatcccagcccatagatagcgcgccactgttagtgaaatgaagatggtgatgtttggctatttgagtcataagtggcatagttgagtgtaaacctggccatctcttacttactccagtgggcgtagttgtctttgcctcgctgtgtcactccaagtcatggaaaccaagccagccactgaaggggaatggggaaaggcctgcctgtctctgtgaaacagataactcttggtgatccatggtacactcccttcaaggtactcctcatagaaactgcacagtcccagaaagtttctcccaacggcctgcatcccccttcacatgggactcctcccttctctacttctggtaatcatcttgtaacctgtgtacatcgattattctgccttgtttgccatctcttaattgccccttcctgctgggataaaagctccagtaggtagggagtttcctctgtcttcttccaaggggttctggacaattgacacattgcaggtctccatgaataatgaagggagggaaggagaaagctgggctccaagagctgtcctgtgagtagccacaaggacttgatttgatcctgaggtgagcttgctaggacttgtggtttcctatgacttgtcaatgctgcactgacggtgagctgtctataggtcacctcagctccaccttactgcgtgaatacaatggcattgcctgggtggctcattagtgcttagagggcaaagttaattgcccgtctctccagtttgcttttctacgggttgtagtttgaccctagccatcgtgacaggaggaggtctgtctacagcagtgacttggtgacactcctgatagctaattctcagtacagccactgatttgttcactgtgggtctcctgcctaatggccaggactggcttatggtgttcaacgtgccgcagttgcacattctgctgtggttttatttagctttaatcccttattaattactctttaagggtggattagctttcacttacaacctctggtccatggctattagacttctttgttttaggcacggcatcggaaaaacaaccaaagaaacctccagtgaatgcatttgtgtggctggcaatccaatttaattttacctttaaaacattgcaccccagaatatgaatctatagggtccaggatacaaatagggagtctgtacctctctatctctccctccctccctccacacacacctttatcccctattttctaaaatgcctaatgtgtggtaagaaccagtaccctaccctctaaggagtatattgttgtgggctctctgtgtgactggaatacgatatatgcaaatgaccaagacatgcccatgtttgcagagagctcctggaacaacagcagaaatggagaaagagtaaatgggtgctatactgatggatatgggcatggtgtcttcaagggcgtatgcagacacggtaggggaaggcatatctagcagagagtgaaacgtggtatgctgagaacagataggagcgaaacacacgaaagatgatgtcgaaaggcaggactgccagagccgagcaaatggggcagcaggcagttctagagctgggcagacttggttgccacgtggttggtctttctgttttaggtttcaaagtgccagtgaatggaatgagcccagcatgcttaacttaaagatgagtgtcggcaatcagccttatttaaccaggtgtagaagaggttggggtttgaggcttgtcttacgtggggtctatactgtcctgataaaacaccacgcccaaaatagctctagaaggacaggctttctctcatcctgcaccttgtagtttatcatgaatgacaagtcagggaactgatgcagaggtcacaaaggatgcttactggctttcttacagttcccgggaccaccagcctagggctggcaccactcacagtggacgggactctcacatatcaatcacaaaccaaggaattgtcccacaaggcttgtccatggggcagtctggtaggaacattgcttccaataaggtttcctctccccaaatactccaacttgtgccaagttaacaaaaactcagtgggaaaaacttctatccttcagggatttaatctatggggtggctaggagggcccatctgtatgccccaagagcctgattagactcaatggttaatgatcttggaggaagagatatacttcagggttcaagtgagagtagccagagagacctgcagagtggagagaggcagatgacgaagcctagggaacagtgacattgaacttgaaggtttgtaagtctgagttctttcctatcccctttttatggagaaaagtctggcacctagcccagcctcgatgaccttgaatttctggccctcctgcttccacctctgggtgctgagattacaggcatgcaccaccacaccctgttttaaggtcttagttcttgacaagagtctgtgtactcttgcatgcctgcctacattctttcgcaagacagttgtattcagattgtctttggagactcttcatactcaccagtaggaccgctggcttcaggcatctcactccaggaccagagagtatcttttgatcagattcctgagtgatttctatgtacagttcagtactggtggaaccccattcctccaatgtggaacatctgtactgatcatagaaaagaggaggtcttttcttcctgttgtatggtctccataggacctacttaactttcagaatctcctccaaatgatagactatggcatatggagtgtgagtctaagtagggattaattggtattttgctacagtatatagtcttccctttacaaagaccatttcttacatggccttgggatgctcactcaaaggagacccagttcacggccttgggatttgttattgatggatgatgtaggacagctgccaggtgtcgtccttcttgacagagaggagcaggagcatcacctgcagcattccagcatgctgtttgttctcaaatgatgatgtaggaagagaggacatacctctggcaatgctggccactcccccatatgacacagatatgatagaagtgttgttggtgtggcagtattgtattccgtgtgggctcagcagacattggaggttcgtttgttcgcctttactgagagctctgcaagagttcattttgtgtatgagcatgcacattggactgaaaagggaatggaaaacaacctgcaaggcacctctgagaacatcagcccccagatgaagaagtctgttctgtaaaccgggagctggagactgttgctcgttgtgtgagctctttctctacttataaaatgacaaccaatcctctaatcctggtttctggaatgaactgtcattttgtccatctgtgccctgcccctaccccactcccaatgaggccaccaataatagtgcttccccaagactttactttttcgtgtctggtcatatcagtgagtttcactgtgaagcttccccccccccccccagtgcctgcatgagtgcatgcattttgtcttataccctatgatactctaataaccccgagatcccacatgttaaaaaaaaaagcataagatatgaagcaagttaaagatagtgagatttgtatggaaaatcaattctgtccttagttatgcatgacagataggagataaaaattgctgaaaattccacattttagcaacttaggcaagttgtgatttttctaaatgtaataaaactctgagaagccaccttcctcataacgtttggcaagaagtcagccatctacagatcacacattggggacccattttctacagggttccgtgaaatattcaggagcctcagatctaaatggtggccttagtttgagagaatgaagatttaggaccttggaaaggaacacacaatgtgcaaaggcacttgagctgtgggaaggagggggctcagcaggtataactacaggaatgcggagaatggagatgcaggttattgtgggtggtttgtatggaagagatcctggctgcatgaagcgtaggcagcggatagctgtagaggtaaggagagaaagccccagaaagcatctgaacgaatgacaaggtgcagtggggccgaatgcttggagaatgttacgctgacatcatcagagagtaaaggcagatgtggctgtgggcaaatggaccaggctggatacgccacttcctgtcaactagaaagaatgaagcatgcagcaaaaggaaaagaaggagcccccacgttctggttgccaaatatagtagaagtttgatgtcagctattatgggagagaagtacaagttgttccccttaaactcctgacttttactgtgcttgtatcccatggttgaactctttcttcttgagggttccatgggcagggaaaagtagattatccatacaactaagtcctctatccagtaggggaaatttgcagtggtcaagcatccatgttaatgagacagactatgaatgagaatacagtaccctcttgatgactatgtagtctacactaggtcctggagcggtctttcaacatctaatatggtcatttaagggaagatctttttttttgggaaaaaaaaaaaatctgaatacctctcagatttctatgagatttaagaagccaaagccaagacccaactatccttcagacacagagaacaatccccagggtgcttggtagatttggcaagggatgatgctgttggtactggtgtgggttaaccagcttttagtgcaaaaagtgctgcgttctgtgagcttctttcttgatagtatatgggcccggaagttaaacgtaggcacctactacatattgaccgcctaagtgggaccgtctatctgaatagctatccctttagacctgggagtgggagtattagaatctagcccttttcctgtccattgtaatgcagttgttgtttccctctctccaattctgtttggagtttgccacagcactcaagatttggtagtttgcttgcctgctaacatgcttgaagatgaaactaccaaaaaaaaaaaaaaaaaaaaaaacctttcaaatggtgtctctgagccttgagggactgcttttaaccctttggaacattagggtttcataggtgatcttgtggttgtgatctcttagacacattcagtgtctctccagggccccacaggttcgttccggttctcatgcccttatgtgcacttccgaaggccataaagtcctgaagactaaaaacatttccgttgctgtgttggaaactttcgagagcaaaagtcagcaaacagtcaccagcttgcatttctatgtaatgaagctgcagagatcatgtttgtctgtggtccctgccccagcctccactggagatgttctgtgataacagagccaaaaggagcaaaaggcattctgtatttatttgtccctctcggcttcccgtaaaggctaactttaagggattctattctgctaagactgctgtcacaaagcatcagggctgggtgcctacccaaagacacttagtgcctgactgtcctggaagccacctgtcaggagatatgtgcaggactctgtcatgactccttccttgctttctgactgaggtgacagtcagcagcactttgtgttcttggcatgtagatgcagcctccccctgataggaccgccttctgtgtctccccctctgtccatgccagtttctcccttccataaagacgaggtcgcattggtcacaagtaaaagtaagccacgcttctggccaggatgactcttccccaccttaattaaaggagtctttccactcgagttagttaatgagggctgaattccctaagcacctctgccatttggagtaagccttctttaggggggagtcgtcttcttctccttctccttctcctcctcctcctcctcctcctcctcctcctcctctttctcctccttctccttctttgatttatttatttttatgtatgtgagtacactgtagttgtacagatgactgtgagccttcatgtggttgttggggattgaatttttagaacctctgctcgctctggttgacgccactcgctctggtcaactctgcttgcagtttatttatttattatttacataagtacactgtagctgatttcagacacatcagaagagggcattggatcccattacagatggttgtgagccaccatgtggttgctgggatttgaactcaggaccttcggaagagcagtcagtgctctaacctgccgagccatctcaccagcccaactccagtatcttctggctgcccagcatattgtctctctcaaccaggagcacacagttgagggttaacttgggacctcccgtgcaagattgaaagagaacaactcacttgcaaatctttttccatacttgattttaggacagttctgtctttctctctgtctcattgtcactttattaatcagggacggacagggctactttataaaagcagtgtataataaaccaaccagagtgtacccttggacttttgtctaaggaagtcctacttgatatgattttttttctctaatcaggcaggaagcagatgagcagatctgatattcccaccaaactcctataagaataatccaacggaaaaaaaattttttttcatcttgtttcctttaggactgagatcttggaggactcttactgttgcttaactgttcttgctttacattgatttctctctgtgtgtgtgtgtgtgtgtgtgtgtgtgtataaaatctaggcaggccctgacttgcctgtactagacatgcttccctcccatccccaccctatggagataaacaccaagtggtgataatagctggtgaattataattacaggtactccctgtaggttgccctactagtgaccctagtaaatgtgtataacatcaggtgaccaagagaaggccacccaaaggcagagtcctcagtctccactagagattgaggtgtcttttccttaacctcccatcctccacacacagcccaataagctctttgtaccggaacctgcagaagcaagagggaaagaggaggccatgatggttgtcagaagtgcatcctataaggtgttctgaattgaaagatttagggttgaggtctagaaggctgtaagttaatcagctctcttggtcagcgattctcaacctggggtctcaaccactttgttgtgggggtgggggtcacatatcagatgtgtgcattacaattcataacagcataactagagttatgaagtagtaataaaataattctctggttgggggtgtcagcacagcatgaggaactggattaaaggatggcaggattgggaaggctgagcaccactgctctaggtgagacttgtggctgcccagtgttgagagttccttgtgttgggagtttctggtcaaccagacttcctcagtcacttctgctgctggtagttccgaatttctccttcggatcttcatagtgcatgtgcagtagaggacaggtgtgcatccgcatctcctgtgagcagcctcgggaacggatggcttcccagggaaatcgctagtgaagccttcctcttgtctgaagtagatgctttccagaaggactcatggttcgagacaggatgagaggatttcatccatggaacatctgatctcaccgatatcttaattttcatattctctgtgatacaagatttcttacgtgacgactttgcgtgtctgtaatacagtttgccttctctttcctagcttatcaaaatcagcaaacttactattttagagtaaaagatattgctctaatagaaaattgtactagttttcaaagaactgcttggaagtagttaagttagcatttaagaataaaaggaattgttaggagcctagcctgggcttctctagctaacaggggactgcggggaaagaacatggctgtcctctctgatgggaggtcgcgtgtgatacctaccacctttccgttgcaggacagcttctgtagcattcactgctggttcctcggttcctcagcagcccttgaggagcaaccacagggagggcattttatctttgcagaaccctttctgttctctgcaacccatctcttttttgtatctccgagtggatcatttctgcatctcgcttatatgaggccgtaggtttgtccaacctctataaaaacctctcaggatgccctcatgttgtttgtgagtatgcagactccagggttttatctttataatcctatcctttccccggcctgtctaatcagtttggaagttttacattttctctcacaggttaacagatgttaattgctcacacccttaagtttgtgtgaaaatactgcttttgctgtctttgacagagtagattttttagaacccctaaagagataatggaggcaatctaggtgttgatgtggtgattaaacagaagcattagacccacggagaggtgctgtctgatgatgaagcctgctgcaccgatatttaacatagacatgaagacactgggcctgtgacttgacacattggcatactgtctttcagggtttctattcctgcacaaacatcatgaccaagaagcagttggtgaggaaagggttttttcagcttacaccttccacactgctgttcatcaccaaggaagtcaggactggaactcaagcaggtctgaaagcaggagctgatgcagaggccatggagggatgttccttactggctggcttcccctggcttgctcagcctgctctcttatagaacccaagactgccagcccagagatggcaccacccacaaagggcctttcccccttgatcactaattgagaaaataccccacagctggatctcatggaggcatttccccaactgaagctccttcctctgtgataactccagcctgtgtcaagttgacactaaactagcagtacacatacctttcctaaaggttctttccgacttgagggggggggcgggggatgtcattgttgtttgagttttgagatgggatcactgtatgtagcccaagctgtcctgaaacttactatatagagcatgctggtctttaccatcctagtgctggcattaaagctatggaccagcatgaccactttaatggtagaaatgccttattcttttgatacacacattgtgtacttctctctctctctctctctctctctctctctctctctctctgtgtgtgtgtgtgtgtgtgtgtgtgtaggtttcagggagatgatctcctcttaggttagaggagaccatcagatcaggggatctgagctctctccagctccccatatttggtggggttttgttgttattgttgtttagatttatttgtttgttttatgtatgcgagtacactgttgctgtcttcagacgcaccagaagagggcatcaaatcccattacagatggttgtgagccaccatgtggttgctgggaattgaactcaggacctctggaagagcagtcagtgctcttaaccgccgagccatctctccagccccgacacatcgtgtttttaagttttctagttgctgccatttaggtaaaggaaccacatgcagattgaccacgtgtttgcattctaaataagtgacacattgaagtcacttagaaaatagtgcagcaggacagcaccctttatggagttggatatgttccgagagcagttttgtttgcccttgcagtgctgatgatagagagcatttccatcttgaagcaaagcataagtgattgtcagccttgtactggaataattctaatggccatatacagtattttgtgaatgcatgtttgtgtagcacatggcatatagttttacatgtgtttatttgcactgcctatagttgtctctagcttattttatttctgttttttttggggggggatttgttttgtttgttttaaagatctatttatattttacttccatctgtgtctgtgcatcatgtatgagcattgcccccagaaggcagaagagggcatccagtcctctggaactggaattacagatggttgtgagcatgctagaaaaagtgaacccaggtcttctacaggagcaaccaatgcccttaactgctgaacacggtccagcgccttaagcctgtttttaatcttcggctttcgtagttggctcttcagggatgcatggcacactcagatgtacactgagcaaaatgtgctctgggaggtagaatgaagaatctggcctcacatgtcttttcttcttctcgttcatgaagtagtcatgctagagtcgtggtttgttgttgttggttgttttttaattgtgaggattagtgatagtgtgtgcctgtgcacaaccatacacatgtgtatatgtgtttaaaactgtttataacttttctctgaatgtcaggtcttcacttacaaactcagtgtgtgtgtgtgtgtgtgtgtgtgtgtgtgtgtgtatggacatggatatgtgtgtgcttgtatgttgatatcttgcttactctgggttctcccagggagggcacagcatctgctcctgcttacccctggctcacttcctccaccttcgtgcccaccacaggccttttgcacacactgagtactcagtgtctatttggaataatttccaaaactagctaagttcttgtctcttcttgtggcctcatgatcagttatcactttatctccttccatgttttaaaaaacatacttaacagaaagaaagagagagaaagaaaggaaagggagggagaaaagggagggagggagggagagaaagagagaaagaaacacagagagagagaaacagagagagaaacaaagaaagaagagattctacatataggagaatttctaatagaacaggtactagaagaagcggctgcatgcccctgctgtcttggacaactgtttgcatattccagaacacacacgtgcaactttctctctcagctgctttcctggacagtgttgatcttgcagaggctaaggggatattgagcaagtttccccccttaacaaacactcctaacactgatattctcaagagtcacctcaatggccatgtgtgcagaggcctctggctctcaggaattcctttgacccaggtctgggacctcaactgtaggtggtaatgttggttgtagggagaggggcagtcacagccagagatttcaagaccaggaataagaaggttcttgaataaatcattgcttgctcctgataacaaaatcataactgaggttactgaggatattttgaaggcagcttcaccgtttatgcctaggacataaagttttaatgcccctttatatatgcctagggacaatagggaatgaatttgactgtaacctaacccattctcctcatatctgttaaaaccctgtgtaagaaagagtgttggcactgccaggattggtggaaagtggcacattgcagtgtatgcttcttgcctgtcagttcagtcctaaggactggcagagtgtgtgctccattctttaaaagtccctcatggtcatgtgttgaaggctgttctctaggtttgaaagaaatgtgagggttgcttgggttagtgaggtccctggtcactggagtgtatcttaactgaatcatatgtgcagctgtcatgttcatgacctttttggtacttgtaaaacctgacccttgctcacaactggaaatttagagaaagaaaaaaaccccaagaacacaaagaaagaaagaaagaaagaaagaaagaaagaaagaaagaaagaaagaaagaaagaaagaaagaaagaaatctaggtggtattcctaatcctgaatgttatagcatgttttctctcattttaaaatatctctgagatgtggttttaattacctacaatatcctggtttcatggttataacattatttaatcactttcctaattgggaagagtgtgcttctattttttttttttttcatatgaagctgtcttgagcctctggacatagattttctgatctctcagtgcctctgggatcagtcaccagcattatagctgagtcaaaggctgtcaactcttggaatgcttttgggactttgtccatctcctgctccagaaaactggcggcagtaatttgtctttctggtagcagaggcttaaatggtttctatctaaactgtgttaggttatttttaagcttacgtgatttgttataaaaaacttcagtcagtatctttgcatgcgtttgtacattttatttatttattgtcacactttctaggtatttccccccgctctggagttctttgtaagtgttatttctttattgaggatttaaataagtatacaactctgatggtagacgtggggaagaacaaagagggggcttttcagtgactagaatgggtgagacatagtatgccaggtagtcaaaataaacatgatgtgtggcaccatgtagtgtgctgtagccattagcccggtgtgttttggtaatggggaacaaagtctgacccttcttatcgccatcccctgtggcccccagagccttcctatctcaaaggagaatgataacttccttcaatatggaccattttcagggttctgaagattaaccattgtgggaaagaccccttcatagctggcaggcaaggtagtgacttggcagcctatcttcttcaacctggatgtcatttgccttgaacgtacggcacaataaaggcagcccctgcctgccctgccactcattgcgccggccactggaaaaaaaaaatgtggttctcagtaagaattatttattctgataaaaatgagttgagtagcaggtgggaaagaatgcagctcgctgtgactaagtggagctggtcaggtattacaccaccgcagtgtgtcgtgactgaatgtccttgttcacagtgtcccggaaggttgggcagcagggtaaacccagacagggcaacactcaactctccccgagaagtgatctcatctacaggatctttgcctctcatgatggaaagtgagactgagaccccaagaaagatttacatctcctaattatttaaatccagttgaagtcagtgcagctccaaaggtcctctactccgtgtcaccaacacgtgggcacaagagctggtctcttagcgcagaggcccacaattctcagccctgccctccatgtttgagcatgggagagatgaccattgggaagcccttctttaggaagtttcacaaaatcaaaatggaccatgagcaaagttttcggtgtgcctccttgtgagaaaacaggaatactttccttggcacctggaggctctgtttaccacttcaacctcctccctctctgctcctcactgattttttttgtagctcctcgtgtgtcttaggtctgtaaggtaaagcgatttcacccttctgatgtttgcctgaaatgtcttctttggtacacagatgtgtgtacattgtgcttgtaagcaaatggctttgagccactcaagcgttctcctcttggctttgtatattctctgtaaagtaaggaagcacctaacatccttctacttagtacacattttgtcattttcccaaagtagacatttggttttagggaccggtgtgaaatttcaggtgtcttaaaattgcactagatcattgatatattctggagagagtcctggctttccttatttgacagtccccaacaaacctaccacaaatgcatccctgtggacgtggagcagagaggttgccccagtagcgaggactcacatattccaggctgaccttgaacttgctatgcaatcaagggtgctcttcccttcctgctcttgagtggggctacccaagccttctaccagctgagctcttcatcctcactttcattccttctcctagtccttgacacctctgctgagaccattctcactccagatggtgaagcctcccacggcctccagcttcctgtcttaggaagaacagatgtgtgttaagcaacctcagggaaggtggtgatgaggctgcacgtgttcattggacacttcctcaagtcaaccacatttctcgtgtcattcttccccaacagcttccttataaagtactggtgtggtgcctattgcctgcatagtaagattatggtacagagaggttaattatgtgtgtccttcaaggttaaacagcagcaatagggagttaagctctgggaagggtggctgcctccttacagtgtccgtctgggttgtctattgaccctgagctcctcagatcgcagcagagccaggcctttaaacatctagatttcctgctcaaacccatcaccaggctttacctccaatccttctgcctggaaccctttcactctagtcttggcctctgttccttcagattcccctctggcatggaatgtacccagctaagtacatttatggttatctcctgagatattcaatcactgagctctaaggtgaaactaggctcccagattctaagtggccctggcttatgtgaggtcaaagacaagaatctgggttcctggccaacttttgtcatagttatcattttatttctctttgctccaagcaggtggagcagagccagggcttatctcatttggaatgtcatatgcatatattaaatagggtgtggtttgaggcccagtaccaatgtggtgcctccttggaagggctaaaaggaagaaggctatggtttgccttttgtccacaaaataggaagcttgccaggagggagggacatcgaactagataagcctactttgtttcgaagatttgcagaacatactcctcgtccagttcacaggggcctgcagagcttgaacttcttacagagttctatgaacgttagccctgagctgtactaagtaccagacaccagaggagcagtaactagaagccaaggatgggttgttttgaataagatgcctagcccgagcatcttacccaggtgcctgtgggtatgaataacgaggaagtgtgggatagctatcgagctgtggttggcacaccctgttcaaaccctttgtggcaagtcagcatcacctcagtcaacaatcagcacaagtgggaagtagaaagaaacaaccagagaagcccccagttgcctcctaagagagtaaggaaaagaagcgccatttacagcagctgtcatatcgggggcatgtgtactcttgggcactgtgctggccattactggtgctcagcagtgttgatctgtgatcgctagataaccctgtgagttagggactgttgtctcacctcattcacgagtagcccgaaggtgagtgtggttaagcccccgcataatgggaaggggtacagcagagccctgtacactagtaactgctctccgtagctttacacttgcaccacacagacctttagccagctccagccccttggcctctggctgaaggctcttaaggttgaattatgcaccaggaagtttcttggtcaatatttcatagggtctgttagaccttgagcactccaggcagtacgtgtgcaggcgtacctttctcgtcacagttggaagacattgtcccgtggtcagagacctcacccaccaactccagccatgtgtgtcacttgtacagtattcaggggatacaaaaacggaggcgaataaatcacaagtggaagaatgtggatgttctattaaggtgaggcttagctactctttgaagttagttacatagtagccagcaattgcaatagcagctctaagtctaaaaacataaggcggtgtataggtactttgtgtaatgtggggttatgtgtatgggtttacactctcttatactctataccaggagtgtgttcttgagactgaaatcaggtattgagagcttttcaagcaatagattggtggctagaaaagaaaggaaacaaatgaactctagtgctggttaatgcacttttcaaataccacttagaacacttagttttccaaatgcaaatcagttgcctctgcatcagggaatttttctagaaatgttaattctggggttctctcctcaggttatctgagttttgcttaacccagcaatctgccttttagccactctctcttctccgagattctggtagactaaggcctgaacaatgaccaaaaaggccaactctgtcatgtcccagaccagagaccgccaaggggaaggtcctcttgagccttgtgcatgcagtagatgctgggtcttggtggctgtttttctgtttgtttccgaagtgcactggtaaaaagtgaacttgtctagtcaaatactcctcccccgaggcaagccttctgttttatgaacaaagggaaggctgatgtatatcttttttctgtatactaaaaatttacagacctttgattttgggtggatttggagtggggatgtatgggttggtgggtgggtttatggatgcagttatcctctacaggtgtgtatagagaccagacattggttatcttcctcaattgcttttgacatttgttattactactgccatgattattatttggttagactgactggccagtgagctgagagcggccagtccctgccaccccgacatgcatctacactcagctcttacatgggtgctagggatctgaactcaggtcctcatgtttgcacgacaagctcgtcacccacggagtcccctcccagccctgtgctgtgtgttgtgtgctgactatcctgtgactgccagtctcttatgaagggttcctgacctaaacttagcattgaaaataacaagtaggagctactatactcaggatcttgaagtatttcctgtagtctttgcgaatactccagaagtggttaccattgttgggatggtccctgaaggctaactctctccatggtgtgttgggagtggtttctaagacaggctctctctctatcctcaagcctcaaacttctacccagaaattccaaggtttcgttagcgcaacaccctgggctggcacaatagaaactggcacaatagagtgatagaaagaaatgatcaggtatagataattaaacaaataaaaactggaagggtaaattcataagagagctttgtgttttcctagtcctcaagagtaacacatgggaacaggttatttttttctacgagtgtgtgtgtgtgtgtggggggggggatgcataaagaggtcagaagataacaggaaagatagcagtcagctttctccttccacctttatgtgggtaccagggattggactcaggccatcagactagcactggtacctttctgatgagccatctgactgttccctcccccattttttttttttaatttaatgaaaacttgaatagtttagagcatttggcttagcagaatcagtgcatcggagtgtatcggcactatcagtagacagtctacactgggtacacttctcagtacatgtcttgctaagaagatgcctgctgcccaagttaaagactgtgtagtatgtcaggaaacttgaaatctaatctagacttttctcaagtctctatctttgggtgaccaccgaattttctaggcttcaacgttgacttctgaagtgtttgctcatttgatctggtatggtttaggggagtagttgttgttttatatccactagaagaaaagtgtttttccccaggcggtagaaatgagactgggattgggcagtaaacttatgttttcttgataggtttttatttgtgggaacaaatttcccgtgtcacttcatgaaagtgatgtcaatgttaggtgttggaaaaaatcacccttaaagttagaacactggtttctttgtgttgtttcgtttgggctctgtttgacaagaacatctattaatatctgctgattagtttatggacataaatatgagctagggtgttaactggtgtttgcatcttaattccatgttgctgtttttgttggcttgtttatttctaatgaataaaaaagtatagcgccattaaatgtgagctctttccttgcagcgacccatacgtgaagctgtccttgtatgtagctgatgagaatagagaacttgctctggttcaaaccaagacaattaaaaaggtaggttggccaactttttatgaatttcatctaagttataatttaacattttgtacttttgctttgtagcaggtttgtgttttaaggataagatagcaatatttttttaagtgtcccttaagtattatatctgaacatcacccatagtccaaaaccttctcatgttttatttgagttatctgtataaagttttttccccttataacacatataatcaaacaaataaatcattctggttaatgcaatattttttataagaaacacgtaagctgtaatttaaagtttatttaatgaaatggattgtggaattagcaggcaaaagagaaatggattgatttgaaataacttatggaaggaagcaaaatgcttagttatgggaaagtaataaatgtattaataataaagatatatatgtatgtgtatatatatgtgtgtgtatatatatatatatgtgtgtgtgtgtgtgtgtgtgtgtgtgtgtgtgtgtcttttcctgttggtgtgtgtcgcacatgttcatgtggagggaaaaataaacatagatgtgtggaggcctgagataaaaatatatatatatgtgtgtgtgtgtgtgtgtgtgtgtgtgtgtgtgtgtttgtgtgtgtgtgtcttttcctgttggtgtgtgtcgcacatgttcatgtggagggaaaaataaacatggatgtgtggaggcctgagataaaaattagatgacttccttaaccattctttccctatttttgagagagggtctgttgctaaatgcagttctcactggcttggtgtagatggacaggctaacaagcactggatctgtctctgtatccatgcagggatggcaggtgctatgcattgctccacccattgctccacccactgtctacatgggtgctgggacagcaaccgttttttactgactgagccatctcagccctataaaaataatgtctaaatccactcaccccgatgcttttgtttacctatataaaatgcagggatgttttcttggggatgggaggcggctatgtgaaagctgtatgttttctaccaagaatactatatttgtgttagggtttgtttgtgagttactattatcccccaacacacacacacacacacacacacacacacacacacacacacacacacagacgcgcactgtttctctgagtctgttagatagtctcaccactttgccaaaatgtatcctgattccgtgattgctttaaacatattgcatccttcctgctgctatggagacacttcagatctctggcagagtggggtcattctgtacaggaaacagtactgtggtgtccttcacctgacattgagacgagcagtaaaatctgttttcaaacagacgccagtgcacagattagtgggaggctgcctaggagaacggaggccattgttcccagtgttaggcgctggtatttgttctgttcccagtgaagctggggcacctagttggaacagcagtcagggggcctagtcccctgctggactagagccaaggacacatgccaatgacgagggtattgcaatgtctttcatttggagtggcagccctgtttctccctccgttcgccagctggagggagtgtctccatccctgcagccagcctcctggttagtatttgctgtgctgtcttgtgccgtgttgtactgttctgtgtcgtgctttcgggtcagctaaggcttcctctacctgggtccctgctccattggctttgtggtctctttttgtcctttgcctgcctggcaacacctcctacttcatcccatgtacctgtcttccaggtcaggaggggaacattcacgcatacacacacacacacacacacacacacacacacacacacacagccaattccatctcatttctattcatgccccaaagtgtggtcattaagggagggttttttttttttttttttttttttttttttgaaaagtaggggtggggggaaagtgggatcttgctggttttttttttaaaccaatgcaaattgatcattgttggtgttgttttgcatgtgtagtgttctgtgtttgtttgtttgtttgtgtgttttctttattttttctttcctctgctaaaaggcaaatgtgtcgatgacatgttttttttttttttcggtttcagaattttacaggtcatttttacaggttgtgtttctctgacttttatgcctatatgtgtgtgtgtgtgagtgtgtgtgctcacatgcatgcgcatgcacatgcgtgttccctcataaaaaagtgctttatattagtttggaaagacattttgttcaggccaagcatcaaaatatcattgctgtgttcttgtgagatgtatatttaaatagattgataaaatatgaatcagacatggagaagatcaaaggatatttttaaataagtttttttttttctgagaaaaagaaaaaaatacaagttccctttggttataatctccctcccccccccccccgtgtgtgtgtgtgtgtaatgtgtggtgtgttaaaatcttatcagtattgttctttataaaatatttttcaaatgtcaacgttgatgtaagtaaggagcgctttcagccattccaagtttagcacagccttgtagcaaggaaaggggagtcagcaaagtttacttccttcttgacagagtaaatcatctttaatgccatgttctgaagggagtgtttgtttctatagctcctttgtcagtatgtccagcatctttccttcgggtgagctcattcatggtttatggtttcatagtcatgagtcgtcagccttataacttctgaccctccacgtgcgtcctgggtttatagaataggctcaataattgactaaaggttgctttcattgccattttgaaagtcggttttatgaagaaaatgtttgtgcaagtgtgaagagcctgtattatattagcaactgtcagtgccaacacagctgaagattcacaaaataatctctcttccagacgctgaacccaaagtggaatgaagagttttattttagggtaagtttttcttctctttcgtaatgattgttattgatctctagattggtattgagatatcaaaaaagacccctggaaagaaaactagttagcattttaagtaagagatttcccttaagacagagaatgtttgggcaggtagcctctgagtgtgtcccaaattttgaagatctgtggaggtttcatttggagctatataggagagataaaaaaggttgtcaaaataacgcacgtgttattttttttcaactcaaacttttccttaaaaataagattgaaataagtctggttaattttagtaatgggattgttttgtttgaaaaaaaaaatggaatttgaagaaaaaggcaaggagcaagtgcagtttaaggcaacagttgaatttctctgtgatatggattatggtctgctcatccactgtaggaagatgattaaaaggaggcattgcacagtgccagtgatgaggtcagggctggttcagtggtagaggactacttgcctctcacgccggacaccctgggtttgatgctcagccctgcctccccacaaaagacagaaaaattaccagttatgttctggttagaagggaacggtttctaattcagagatctaatgcatacaacgacttttaataccactgaataggggagcatttcctcagcccccggcaccccctgttcagagcagctggatacagaagggcattctctgaactagtggagactggtgcttactggtgtttgctcgaagatattaggacacattaaggcctcgaccatttacttgggaaagagaaggcctttcctatttcaaaatgaaagcccgagttgtctatacactctgctattaaacacctccaaactgctccagctttggccttctagtgccgccaggcccagggcgcaagaccctggcttcttcctctcagccgtgctaggatatttttttgcactgcgaatttggataacttgaccggcatctgttttctattatgttcagagctgaaatgtggctctgaggttttaacacttggtagatcccatgcccagcctctaccagatatattctagataactctgtgaaggaccaaaatgctgtcggaggtcgagaagggtctgttactggctcttagctaactctcagatacagcaagcaaccttctcgtgaaaactccagacagtttgtactcctcctatttgaaccacattgtctaaattttagtagatataaaactgtttcagtgaatcataccggtgggcatatttttgttttttatttaagatctttattctattccttccacaatttcgtattgaatgcctgttatgcgcctgttcctgctagagactatttattgctgtattcctgatgagtgtggggccctttgcagacttgatgaacagacaaccatccttctgcttgttctgttgctaagcagatgtggacccagggccaagagctcaagttgggctcccaagctcaatataatgccgttccatgttccattaggaaggagcccaagcctagcattagacccaagtcccatgtctgtcctgaccactcacagcctctgaaaacaccaagcattcactctcctggatcccttttccccaaagaaagagaggtgtagtcttttcttccctgattgacaggcagggatgcaaacatcagtacctggtgccatgtctgggaaggttggtaactagtcaacggcacctgagtctacttgatgaaacatgggattttttgggtgagtttggagaaagagaaagaagcaaacagaagcagcctcggggtgtgactttaccttgacccagggcaagttctgattgctcagtatactgactcgtgggttcctgggcaaattgcttcaagcccctggttccagtgatttctggtgtgaaaatgaattggtagttacacattgttgggttgttgggagaattaaatgaggccatatagtgttagtgcttcaggaaattatagttgtaggcgggacattaccatagctgagcataggacctttacctataagggtacctctgtagaagacataagaagtccttatagactgttgagaatcactcttcaagagaccatgatacacgtattgtctttttctggtttgcccagatattagggtagaataacagcatacaagtcagttattgatatacagtagattcctgtgtgctaggagtcattcttaattattcctgtctcttatttcaattttaaaattatacctgttgatttttgaattatcgtttctgttccttttaggtaaatccatctaatcacaggctcctatttgaagtatttgacgagaacagattggtaagtccttggttttgagttttatttctttaaaactgggtttttcgaaccatgcctttcagatcttctgggtcacccgcagtgcgcatgcctccaagaagactgcttttgtttcactgttaaagttctcagttccagcaaatatttgtgtgttgctaggtcagaaaattgatttgagtatgtgtgtatttcttttatagttaatactaataaaagtcacctatgacgacctcaccccagatgctttgtttggggaatatggataggcgtgtgcatctgtaaacgaagccatcaatcttataaacaaaatgtttcaaaatgttcctcagacatataataccacagcaaattcaccgacaactctatggtgatggtctctggggaaacaaaaatctaattaccagttagtttataattaaagcaagtctcctcagcaggtgaaatcaagccagaggtactttctcaagaaaaatctttagaaaggaatttgagaggactagcataagggctataggtatggctccatggtaaaggacttgcctgtcgtgtgggggaggtgtggctcagtggtagaggacttgcctggtgtgtgtgaagtcccgttcccactaccgtaaaaacaacatatccatacatgaaggaaaacccaccaaaaccaaaataagaactctcaaagacgaacttgaagaagagctgatataactagcattttatatataggctgtgtgtgtatgtatgtttgcatatgtgtgtgtatgacatagaatatacagtgcatatgtgataatcaagacagctctttggagtgagttctctcgttccacttttacatgagttccagggacacaggtggctgactggttttgcatgacgagctcctctatctgtggaaacatttggctggcccagtgttttgttttcctaagtaacttgagtgtttacatcaaattctcatgagccaagtgtcccagctatgaaaaggaacatgatcatgttatatgtcagtcgttcaagcactctcagaagtaggaatacaattccgggcgcgtgattgattccactcctacttactgtcctgcctaaaaggaaggtgcatttgtgagctcgtccttctgcagaattcgatagaaactcagcaaactgtaaaatagcttgaagttgacacagtgtatccataagaagatccctgagacaaagttatgcattccctattactaggaatgcaggaactctggttccaagggtgactgtggcgaaaggccagcgaggggatacacagggtcagacgccttgtcttgttagtgtcagcctatgcgggggaatagcctgactttctactcttgataaaggatttgggggtggatgtaatctgatgtatgtggctttcgtcttgcaaatggagcactagcggattgaaccttgactcccagcatctttcctgttataaatatgggattgtggtggcttctttgaaatgaagtgtgtcttgggagagtgatcattagaggtgaggactaactctcctgtgagttgcacagtgtagcttccagcccctcacacccctccagcgaggcccggccagtgaatgaaatagcagcattcattgaaataatgtaagcagtctctgcaagaatggggccttcacacactggtacttaccctccaagaaagtcattttttaaatgaaacagtggtcaaacttgaagactctctatgttcttctgctagagaaatgtactgtttaaaagtgtcagatttcccattgtgtgtgatctaaaataatgactgcagtcgagcgaccttgccatgggtaggaaaccatgtttccaaaccaaaagggggctttgaatgcagagcgattaaaaaacccgatgagcagttgtgttttatgtgttcatgtcatgccttgccccgggctgtctgctgtgtggttaccatccacagaatgtcaatggtgctggcggtggcttttttgctttgttgtctgctaatccagcaaagacaatacgtgacctgagtctatctacttggaagttctggcactgagcagatgagagtctaggtttcacagaggttattttttgccattcaaaactctgagcttttagaaaacaagtttgggtgtgtgtaaacactggcttaatccgccacaccctctgctccagagctgttgacagaaacgagctttgtagattttaaagtacgttttttgtcactctttgcagcctggcattttccccttttatttttttaaagttctgcctaaataaatatctttgttaaggaaccaatgtttctggggcataggaaagagaatatttccaggtttgtgatgaatctgatgacagtttttggggggggcattcacttttagttctcaggtcttttcttgcatgttgcaaacagaaagattctaggtttgtggcccaactgtggtaatcttgatgagttctgcctataaaaagagttccaggcatttcttctgtatgatattcaagttaaattactacaaagcccatatacacactcatcatcatcatttctctctctctctctctctctctctctctctctctctctctctctctctctctctctgtgtgtgtgtgtgtgtgtgtgtgtgtgtgtgtgtgtttgtgtgtgttgtctgtgtgtgcctgtatgtgtcatgcaaatgggattatatgagattgttttcccaggctgggtttcttttctctgttaactgctgtgtctggcaatcatatcataatcacacccctctttaaatgaagaatgtttctagtaagtagcaggaactggaccaggcccacagctggctgtgcagtagtgtgccccctgcgcctccacttggctattttgttacttgtagatcatagtctaataatttcccactaaagggacactaattccacagggtgtgtaatcgtatttatagtacattttattacttagcattccctcgtggtagtgtggtgatatcataacagtaacataacatttgatgcttgagagagttcaccctgcagccaagctgtattttactcattctccgatacggtggggaggtggatgacatagctttgggtacttgtgcctggcatccgctcgctcgaaagggacctgttgctcttggtagctgggaaagcagtgccctatgagtgtgataggtcagatttacagcatggttgctagtgcctgcgctgctgccttagtcagctgccccagctccctgctgggccgcccctttctgacaggactgcagcagctgggaaggtgctgtttcaggctcttgctgttcagagggggggaaaacagcaagagaggggaaacttcactaagtccagaagctggcattggaggggaagcaggcggtcatgtgtctctggccatcctaccctctgtcacagagtagatgagagctttttgctcttacccaatcatgcctggaatgcagctcgccacttgggctatttctgctatctgtcgctcttggtgccgcagtgctaacggtttggcagatgggacactttttcttggagttggtgtctttgggttttgacttctggcagtgccgggcgtgttgttgtcgctcgccctctccctcccggcccccctggtcaccatggcccatcggcttcggtttcattttggctctggtcgcagcaatacggcccctgagtctgagattctagaccaggagagagaagaggactttttcatggcattccagacgctgccacggagaagcagcccgcactccttcacccagagcacaggggaggacagcggcctgcaggagggcgtgggcgctctcaagcgcagctcatccatgttcatcccgcagctcctggcccgggtggacgccaggcccacccgcagctcctctgtgcagatctccctgcagcgaaaggccgcagacggtgccacagacagctgcgggccaccggagggacccgaggacaggtccccaagcacccaggctgacctcggagaccaggccgcagccacaagggtctcggctcagatcagctcatcggagccctctccagtggacactcctggaagctcccctccaagggcagcctgggacccggggaccttggtcaatggcacttgtgatcaccatggtcagtgtccccacctggccgagggtccggaggaggccaccccaggcctgcgcatccaacaccgagcctcaagcgctgacgtgcgccaggtgcggctgctgcctttcggcccagatggccaggctgagcccaggcgctggtccctccagcatgttccagatgcttctgggagctccgggaagcgttgctttgtctttcaactgcagcagccccagcaaggcgctctggggctgactggtgacttcaactttggcttcaccggcactaagggggacaggttggtgagatatccacgcattcgactggaaaggagcacgtcataccctacccagccccgagctggccgggtaagccccactgaagaccgcggaaccccagaagcatcacctcgggccagcagggtggtccccgagatccgcaggacaaattcagagaggaccccgcagagcccggggtgcatgttcaagatcaggcaggatcaaaatgcagggcagcagcatttccgaattcttgtgactcggggaccagaagaagccccccaaaaccaagaggagactcacaagagccctggacaccctggagctggcgctccggtaagtccactgatgcacatgtttgagtggctcagaagggaccaggccaacccagaaagcttggttattttgcagcgcaaacctctgccgagggagtatccctcgctgttgagtcaggggatcccagtgttttggtagcagtcaatgaagctagttagcctttcaggggaaaaaaaaaattcttttccgtaggtcctggacgtcataaagctctgtctgttttggaatctgcagcttaatgcacactctttttagatttccttctggatgaaagaactttaaaaatatatttcttaaaattattctgctataaaaaataagtcagcacctagatgtgctgatgttggtagtgcgtttgaaaccctgcttgcaaacacggttctgacaactgtcagagaaaactcaaaggctgttgggaagactaggcatttgagcctcttcatcaaggccgtacttgattcttctaaagacatcattcgttctcgttataaagtgtatcattgttgggttttgtgccatttggtaattctgatcaagtgtatgtgtgtcactctgaagacagtaggagatgtgtccccgggcgcagattggctatggacaaggtaccacgggaaagctgtggtgggggcacattacacagcagtgtaacttagctcagcccacttgagagttcaagccaaggatgccaagggatggagccgttctccagctgtggaaaccgtccttagagggcattctggctttgttgcatgtggggggtttgctctctcctttctgtgaaatggagtacagagagacagctgtggactgcccagcccgaatgacttgcagctcatgtagtttcagtcagtcaggttgccttgtgctagccttcactcgttgagtgttctctctcgaagaacagcctccaatttttaaatggtctccctccccggaacttcttgtgattggtagtctcagggtatgatcatgaggtccctgtggacctctgtgtttgggtttcagtgtgatatgtctttttaagtaggcagatgagttggtatcttagaatactgtgggcctttattgatttgtgtttggagtgtttctggttagtcgggtaaacttgaacacccccccccatcattcaattttcacccgtgtttaggaatgaacaaccatgaaaggcaaatggagcctttcctgctttgttatgtccattaagtcttatacgtttccttggtccaaacccatacagtttccttgactgtaacacagatctcagtgtgtcttgacagtgtagcagtttgtttaacctaccccaagaaatcactatagaaacagtttcaagctttatcagcaccatcccgtgttcagccaggaacagcccccagtgaggaatgcctttcctcaggttgacgtgactgctgaaaacggaagtcctttgtggtgtttaggtgttgggtacagatacagttacatgactaaactcccagtctagaatctctaaagaaatttttaaaaaaggtgtcctaaaatttcgtggatttttaaggatgtaggtttcaagaactatgtagatcactggtcctcaatgtgtggttcatgacccctttgaggaaggagccatgtatcagatatttacactattgttcataacagtggcaaaattacagttacaaagtagcaatgaaaataattttgtggttgggggtcaccacaacatgaggaacaatgtatgtattctggacacataaaaaattcacatgtggttggcaaactgatgcttttcttttaagcaaaggtctttcccccagaacaaaaaacaaaacaaaacaaaacaaaaacaacaaaataaagtaggcaggcaggaaggaaggaaggaggagagagcagacttggtcttgtaatggaacgatctgtctattcaccagctttgtatgtgtatcatagagaccaagggtgttaggcttggccagcagctgcctgagccttatttatcttgaaggaaaacattcacttaggcgtctacagtctggctgtcactagcctccttcagcggggttcagttagctgctgctttactcttaaggacaggtcatcgttattctcaatgaacaattaagcacaaccgattactcagtctgggtgtgagtgatgtaggaaatcttttgatatggaggtccttttgcacagcatgctcagtgtgcttttaaatgtgcctcccaaacattctaaatctaacgatattaaccagctagattcttagtagaaaatacaggggaaatctgggtgagagtagactccccaaacatcacccataaagcaaatctgttcttaaaggtaacagcaatagacaagaaaatgtctccagggtcttagaattcaccctctccatctgtggcattcttggaagtctcttaatgaattagttaccatcatagattaggtttttcggtataagcttcctggctatatttgagttatcctgagatggttaggctgtctttactcacacacaaacacaaataccctttccacaaataactgtcaagctcttccttctccaagcctactggagccagcttcctagtcccattgatactattaagtgttcaagggcttccatatgtatgctcttaacctttgttacttagaaaggcactaactggggagtttcttaatttcttgctgacacaagggtttgtaagtaaatggagggaggaggaccctggagccaaagcgggaattcccacaagggagtggaggggagaaccttaccttctcctgcaggccttctgagctccagcagtcttcagtagcgcagtagtcttttgtgaatacaggtcaacttcactggacaacaaaggactacgcgaattattttcatctggagagagtttcaggttgagtgtctcccagcaaagcctcttggcttttacagaaaaaaaaatatgttaatagttattaactataaaaatactccaatcaaattttagctctcagtttgttggaaagaaaattatgttgtaatagaaaagggagaaagttgtagtcttttaattgtcttgtgcttttggtttggttttgtttttaacagattttataggttttctgttttatcttttctagtgtattgatctctctccgtgaggtcatgcttgagaataacccagggctatgtgactcactttcactcaaccattttcagcaacgtcttaaaaattgtaaaggcagtacatggggctgatactggctagggtttgtcccccaggtcagctggtacttgaagtgatagcttgtggtatggaacatcataactaagatcattattattatcattattattattattatatcattaacattattatttacttagaaaatatgatatgaaggcatagctatcttactgggcgttgccaaccagtgtgttaatccactgtagatggcatcatgttgataacgttagcattacttgtattctgtagtgcgttatgtgcatatgactgtatactcacacgcacagcatacatgctgagcctaaaggcggttgtaatgttccttgtaatgcaacgttcttgtgaaaaaacgagtgaagcgccatagagctgttagcactgtcctgctggaggtaggaggcagctagggccctcagcaggctttggctctggggcctggggtagttagactcattcttcggcaccatcagcagtgaacatcgtaggctacctgtgagcagtcagtttctgagtaacaggacaacaaatgttgatggcgtatgagggaatgttgactcttccatcatcatgtcttccccaacctcttgtctcccatgtggcccgatgataattccattcttaaaaggaattgagtgaaggacctttggttatattcagtggaggctggggttctttttgtttgttcttaatcttgcaaacgtttttggctgcatgctggctcgctctgatggatttgcgtggtgacactcatactctgcagaggcagagggatctgtgtggtgtttcctcactgtgtgactttaaaatgaaggttgctgctggcaatgcacctcagtagatcctgccctgcctaacagtggttatgatctgggggtgctgctgctctgcttggggaaatattgaggcagacttccctggtctctccagccaatcactgacctcatgatacatataataagtgtactgtcttcataggggctcagaaggccaaaagacttttattcattgagagttattgtaaaaaaaactaggcgtggtggtgcaagcctttaatcccgcattcaggaggcagaggcaagtggatctctgtgagtttaaggaagttccaggacagtcaggggtacacagagaaatcctgactcaaaacaccaaactaaaccaaatcaaacaacaacaacaaaaaagaattatcttttgagtcccatttggttggatattttaatgtagccaacactaatctgaatggccctgctgtttgttcaaactgaagccaacagatagattcttttagttaaagtcattaaatccatgttcttgctggaagggtgtaactaaaagtccctaacttcctatttgcctttcagttcctagttgtgaaacagttgtgataatagcagaaaataaaccccccctcttttagatgctgaatacacagtggaggatctgaattccttcagaaaataccaatagactgccagtcccaatctggacctggctggtggttggtcagacattagcctgtcacagtcttcctgtttctttcttctacaaaagaggtgtagaagcctaccagttgcctggaagaggcagccatacacacccctctttagacacagaaggatggagtcttgaaggagaaatgatgatagtgggcttcttggtttgtgagattgctgaaagtgtttaacaaatacttctctctcaggtctttcaggacacacaatgctgtcacggagttttcttcctaatttacccgatggcgttgctttgactttcttgagccaactgatacccagagagggtttgcttcagggagagctgtggcccagggtgagtgggccagtaagtccctgtgccctggccagtttgaggttgtcttgaatccaagtgactctgggcagcgccgtgtttgaacagggaattagtttggaggctagagggtggagtagatggaattttaaaaagtctgcttcttaaagatggggatctagagctgtagctggttctgatccctgtgagtcaaatgttcccatctctcagccaagggaaccaaagaaaccaaaggatacattaagttagagaaccctgatttcattgatttgatgatcgtggttactctttaaaattgggttacattgtatctctaaggctgggcatgtagcataggatgtgggaggtcccatgttcctcctcaacaaaagtgtgtgtgtgtgtgtgtgtgtgtgtgtnnnnnnnnnnnnnnnnnnnntttcttaagcaccagttcagctgtcctaatttttctaaactagccagtgttttaagtattagtaaagaggatgaaattctaccaggtagcaagagaataaacattcccccccccccccccaggtaaatgtgcatctcagaagtcctaaagttcacactgccagtttttatagaagaccaggagttcagcaactttccggtctctgcaataactgggggcatctgtgtggccaagcgctccattcctggaggctttctgtgctcagggttagtgacgtgtagagatgcttgatgcagctttgtccatctttgagagaagaatagtgatttttcacgctcgagatttaagaagtgaacgcctttaaactgtacctagtgacccatgcatgttgcatttgcccacatccttgactgcccattttcaaagcttcatgatctcactgcttgaggatttcccatgtccctttagaatgtagggccacatatgaacctctagagaggaaaaacaatgctttggtccaaacttttataattaaggtgggtaggtatttaaagtgtatcagaaatattgaaatatgtatattaaaactcgagcctcctctccacctaaatccaaaaattttagaactttttcaaatccagtttttcaggctagatgttacagcccaggactaagatacgtcttgacttccttaaggaattaatctcaggtgggcgggtagaccagcagcaggtgctctgggcttctttgttattctttattaactaaaatggctttgtggcatcatatggccttattcttggttttacattccgttaaagaggcaataagtggcttgcaacctcaaccgttttaatttagtttgaatattttggatgacttaacctcgcactagtaaaatcatgttgcttgactgttggggaatctaaggttggagctaatacgccgcaatggctgatggcgttgttcatggatatggttttcaggtttggctgtttttaacattctaaagttccgtgtcgtgaaacgttggagttcgttgaaatgaagttctgctctgagcagaggccttcctgaggatatgcttgttttctgccttgttggggctgaactagagtgctatgcatgctaagaaggcccctacgctgagccacactgttgtgattctgtgctttctgggtgtttctgtaaagctttccatagttacacggaacgggtgggaggggagtgtgctgtgctgtcgcagtcatagctgggtttgtgtctgggacactgtgggaaatgatgaactctggaaattttcatttctgcttctacctacgtggagtgggtcatttggtagggtgtgtatatatgtgtgattatttattttttttaaatcctggccacaagaatgtcttcctgaaattatagtagtttcagtattctaattcctgctgtcagacaccgatggcctgtgtacagatcgccactaggagctttttctgttaccactttaattgtatttattgtacagtctcacagtagttacccctcctcctctcctcctccgagtccctctatatgccccatccctaacccccccaccgctagcctcatccactcttcctttcattctctttagaatagggccagcctctgtgtgtatcaaccagccatggcagatcaagttgcagtaagactggggacctccttttcttttaaggctggttaaggcaaccctgtaggagaaaagagttccaaagacaggcaatggagtcagagacagcgcttgttcccacggataggaattctacaggaagaccggtctaacaactgttacattagtgctggggaagggcttaggctccctggttggcagttcagtctctgtgagcccctatgggctcagattgattgattctctgggttttcatgtggtatcctaaacccctcttgctccttgatttaaaaacaaacagaaagaaaagaaaagagaagagaaaagaaaagaaaagatgtatattttaaaatcaagtcccccaaagccctattacaatcaaatgaaagcctgttactcaaggtagccagccaatcacgaaaatataactgagacaattcccttccctaagagttttaagacttttgtctgggaagaccactggaatccagcttactgccgcctgccagaaactgtctgtgttgagcagctattttaaacttcatcctccaagttcagagagcatagggctatctttatccctggtgaatggtttattatccctgtgaaaggaggagttgcacacacataagagagatgctgtggtgatatgggggtggggggtagtccttgcccatagtggccttatactcttagagagcttcttatgtccggtatctagttttgacctgctagatactgaccccagaactgcgagaccacagaactcatgtggatgtctctgacccctttgaacccagaaggaggtgtgactaatggacagtttcctctgagattaaaacatcccattctgcagagaagctccttaaacaggaaggtaaacaactcgaaatagcttcaggaagtccccaaaactgatgagattcactaggcccctccctccctgaggaaaaggctgcagagaatcacactcagacaaagccaagctgcaaagaagactcagaccagaccacctgctttgaagagatttagaccaactgagtcagttagaaaagacactcctcaatctattgagctgcctgcaggctgtgcagtgtgctcctggctcccagcttttatgagctgtcacccatgttggagtaggcttgggtgatataactgtctgagtcatttcttgctgcaataaaacccactggtttaccaaattggattttgctggtatccatactctggtctgtcttgggttctctctcaggcatgagtagctgtatatgtagggtctctccagaaagctgtcacccaaccacaagcaacgtgtaaaaagggtacatgcaaagaaaccagtatttcgtcatgaggatgaaagtccatagttgcttaatctacaaagatacctgagtctggggtgagagtaaggtttatagtccttctttggtcaggtactaattgggaatttttttttaaaaaagattgcaatgaatatatgtgcatgcatttttacatcagtgatagaaaatccctcatcacacttttcccacttgccattgaggaccgaagggtcaggctgccaagaggaatccaggcagtgatgtccacgcagttctgcacttgttgtctgtgtcctggtgatagagcagaaaaatcctggatgtttctaagtggtgatgtctatttcagtgcctttgttttgttgggagtattttcgatgccacgggggaaggagttggtcatgttgtcctgactcatgcaaccataatatttatttaaaccttaactgaagcctcttcttctgacaaataagacttttcgtctggtggaacaaatccgtaggactccccagaaggaccctcccgagaccctaagatagataaatgaacttggtagtggatcagatggataagcactcattaagttagtcattaactcaaaactcttctttcaagccaggtaccatcccagatggtgggaccacagcaaggagcagaaccaacccagccttccctcatgccacaccattctgttagcaaggacggggatgagcggtaaagctgctcacccatgacagaccagagggtaaagctcagcataggagatgatggcgagggctacagaaatggaaccaggacagggattacgtgaggcagccttgggggatgtcgaacacatcaagtccatagctgggaggagatacttcagagggacaagtgtgtacaaaggacttaaacgccaagtacacttactgaataaagggaatggcaaggaggggcacaaggtggtgctaagtacacaaggacggcttctagcatcattcctgttgctgtgatgaaagactctggcagaaagcaacttagggaaggaaagtttcatttgacccctcaccccaccaccagttccagtttacaggccatccctgcagggaagtcatggcagcgggagcttaaagcagtcagtcacatcatcacatcggccgacaagagcagagggaaatggatgcgtgtgtgcttagtactcagctcgatagttctagcctgagacaatccagggcccaaacatcggggtcacgtcttcccatgtcaatcaagacagacctacataaatgtgtccatgggcaacttaatctagacagtctccttgagactcttacaagactagattatgtcaagtcaccaaatgaaggtcccctccatagatagtgtccctcaggaaaggagcatggtcatggggtgagcagatcatggaacatatggagatgcaaggccatagaaggaacggctctatgggggtagagatggacacagtggccactctactgagagtgttcaaggcagtaggagctgagagccaagtgggcaggctattgtaagctcatatctccttcaaggatggaaggtcatggtccctgacttacattgttgtcgccaacccttccctcatccccagttactccccagagtgccaaggataatcgtcagttctctgaggaggtcacctcacctcagtatttagcctgccattttcattttgcaacgcttggaaaaatggagagctttcatgctcctccagggagtgttatttcaagatgtcttctgctgcctgtgtcgggccagggtgtgggtggatgtatttttgcagcttctcaccagagagtcggcttctgatttgcagaccgcatttattatgggtcatattgtccattgatgaataatgtgtgggctgcaaagcagatatatagcttttaaaatagatcatttatcctgcaggcttcatcccccagtaccaggcaggctctccagccgcattttctggaagcagagtttggaacgtttccttcacgatctgggtcgtcagttcatcttctggcctgtcatgcatttttccctgatcagctggggacttgagggtgggctcccaagcacagtgtgaatctattggcaaagacatagtccaggcggggtttggggatggtattggaatgcctgctgaggaaatagttgctcctttgagctactgaaaatatttcttataatgaggatttacacaaaaggagaaaatagacatcatggtttctatggaagtcctgtgggtatcatgaagtaaccgaacccagctgatcctcatgaccgcagctgtagaaccaggcctgtatagagaggttctgtgtaggagaagatgatgtgtcttggggggagaggaggaacctcctgctaggtataatggggtttgggagttttcctctagtggtccagggcaccatggggtctggaggtggagtgaagcacagtctcctctctgatgccacccccacccctagtctgtgggtcaaggacctcctgtcacagaaacctccctaagggttgttttccctttacacagagttcttgttttgcctggtgtgttgcaatctgcaggcagtggccaggtgacatctgttggaatgctgatgtgcgctgccaagcaaaacagatgcaggaagatttgccaacgtggggaagaagggacagagtgagcggtcgagggtattgggggcagacggcaataatggccgtatttatagactggaaggctagcttaatgccaccttgctttaaactccttaggaaagctttctaagttcatgccgctgtctgcaagcattcagagaggcttccatttcccaccctgcatccaaaatggtgtttaaatggttcagcacagaaggagggatttcatagcaacatgttgttttctgtaaaccactggccaccagattttttttttttttttgaatctgtgtttttgttattttcgaaacaaggttgaatcaaacccagactggcctggactttgatccatagctgagactggccttgaactcccagccttcccttctctgcctctaatttatcggagttacaggaatgtgccaccatgcctggctacctatgttttatattagtttattgatacgtttgccagtttgctgatttaactcccagtgggctaagatctgctccaaacactgcagatggaattcatagagttttattgatggtgattatccagtaagaaaaatagacttgtggccagaagtggcctcattggccatgaaggagtagagaagtctaatggttacttttcttctccatttgacagtactggacaagaagcaactgaggggaaagggttaactttgataccaacacagcatataggagtgggaggctgctggccacatttcatgcatagtcaggaaccagagagtgaacggcaagagaggccagattatgcaaccccaaagtctgcccctgctggcctgcttcccctgtctagcaaggctctacctacccagacagtatcaccaaagaccaaattttcaaatactggagcccaggagagttttcatattctaactgcagcagagtgttaatacctggggttgcacacaggcaattctgaggtacagtcagggccaagagcagctgggtaagctgatgcagctgacatcctagacctgtttgatgaggaatagccatggatgtgacatgccatctcttcttacctggccttcatcactctcaagtctgcctgccaagtggtgcttgggggcgtgctccgcaaaattaattcaggacacctgggtgacacctttgcattaaggcaacgaggtgttcctgtgaggagtttcaaagtctgcatgatagagcttgtctcccggaatagctcagaagtaaaaggattaatttttcttgtcactttccaactgtaagaaggaggtggaattggggttctaactctagctggggacaggccggtctgtcctgtgagcctgggcacagatgccttttctcccggtagctgcattttctccctactgcaaatattagctgagcacatttttgtggcttttggaatgccacttcttaaaaagaggagggctgttgtcagatttttgacatttctgacggagctgggaagtggtgtcttcttattggaagcagaatctgtaaaggggaaaaagacaaagttcctctggttgctgtttttgaattagatagtatggtcccttgtccaagtgtagctctgcaggtcccaccaaagtttggatctcagggcccctgatgcccaaactaccctcttcctgctgtttggggtttaattgtaccaaatccgggctctcgatcgtctccattgagcgaaccataccgggacagctcggctttcagattgcccaatagctcatgcttacattgctctctgtggtgccatcctaagtagacaggggcttgcatgtcccaggttttgtttctcaaggtgacctttgcaacatataatctggttattcttaaggtcactgagcttatctgttagcaaagcagggaacaagggagatgactcagttggtaaaatgttttagcttgcaaaagctgagaatctgactcgattcgtaatatccatgtgaaaaagctggacatgaagaaaacaacagattctactggtgcccggccagtgagcctaacctgcccagaaagctccagaccagcaaaagatgcacctgaagaaccctggagttgaactctgacctctgcacacgtgtccacctgtgtgggcaaacacacacacacgcgcgcgcgcgcacacacacacacacacacacacacacacacagaaatgttggtggggctaataagaggcacacacttgcttctgttttgacgttctcagagccctatgatctcagagatgtctggagcacatcaccagtcctctgctgagccagggatacttatgcatctctcagagcagtggccctgtgtaatttgctgcttctcggtggctgaggatgtaggaggcggctcactaagcttcggcatgtatcgttgttcatcagagtaagatcataaaggccgggaagaaggatgctaaatagtttttaataaagtgcgtgctgcctgccatcttctgccttccatcgtatctcctttctggctcgctctttgtctgcatccagcatctctataatcacacttttagaagggtggatgtgtgagttcagtaggctcatttgaccctctctatctccagccatggtgagagaataagcccttattaatgcagtgcttaataaccataagcaaatattaactttctgttattgctccctctggaagaggagacaagaattcctcacgggtgtttgaggactgaatttgtcacaagtctatctgctgatggtggtgtcatcagcaaacggatctcaatttatacttttagtcgccacgtaaggaacgccatcctttcagaattaatgacttttctaacatattgtaatggaagagtcctggagtgggaggggaaatcaataaaaaggttttttgggttttgttgttgttgttgttgttctttttttcaaattttatgtctcacttgatgagcaccatcaacaacttttccttttataacttcaggttacaggactttagagatacccaggtttatttacttttgcaaaaggcctcagtgttcttgagcaatggctacctctccttttgatgtatttcttaaaagttgttctacctagtcttcattaaacccaattttaagtcactcttttagaagcatgccagaaaaagaaaaaatagttgtaaaatggttttatttgttattttgaggcaggctcttatgtagcccaggttgatcttggaagccatggtctttttgcctccagctctgagtgccgggattataagcaggcccagtgtatgaagggatgggggtcagccccacggcttcatcatgctgggcaagctctccaccaactgagctacatcctcagcatacaactcatactaagaaacctgaggtcagtatgaattgtggtgattataatctagattgaacagcatcaggggatgggatcccgcctcccacaccagctgtgtgtgtgtttgccttttggtaaacagcagcctgaaagtgtaactgatggaggggtttccccagtcggggttatcaggtttgtctgttggtaatgattatattagaatgtgtttctcttcggtccatgtgatttgccaacctaatgccaactgtggttctctggaatctctgagtttcaggagtctattaataaagaagatggagagaattagttgctaattttgggtgcgcttgaaacgagattgttagcaaattttaccttcagacctacaaccgtggtttgctgtccatcggacatcatccttgggacagaaaataaatacagagactcagggaaaaaaaaagtctgacactttccatatcttatatttcctttatacttgtcagtgttccttaggaacatgtatatttcttttcttcccaggtttgtgttaagatttgacattataaattctaccaaacagagactacaagtctgtactggtcatgaattctttcactaaagagtaaaacctaagtaaatgtttacttctaaacccctatgagtagagagtaagtgttcattgtcactgacagaaggaaattaatacttacttcagcctccacctagcccaacaacaaggaagaaagaataaattgaggccaggacaacatgtgacacgcctgttgtggctaccgggagtcagttcagctaggtgacacttctgaatccgttggacatcctaggctctgggaagtccacagaggtacaagtattaaagaagacagaagggcctgtggtcgttaccagtagcaaagagaccctgatgagtgaaatatctgcccaaggaagtgaacaggagtagagacaggaagttccatggatgtatgtgtgtgtgtggctgtgtatatacatacatcccatgtgtgttcagacaaccaaagagactagaagatggcaacagatcctctagacttaggcagatgtgaactgcccactgtgggtgctgggaactgaattcaggtgatttggaagaacagcaagtgatcttaactgctaagccataccttcccagactccaatgctggctgttttaaaaataggaggcagccagaggaataaggatggcctagacactcccatctctccttctggattttaagttctctctctctctctctctctctctctcatagtgggagacaaccttttgtttccttaacattctgtgctgcgatttctataaggagctgtaagggtccctctacggtctttaggattaaataaaactccttttgtttgtttcctgtggtacattcttagaatagcaatatctctgtgtgtcccaagtggctgtagaaccggtattgtggctatataacaagtcaagcagacgtacttatcattctgtaagccctaattgtaccattctctttcctccgggaaggccttcctggccttccctgtatgctcttgatatagccagaagaccatagttacagattacatctatggcaccttctgaaattcaaaatagaacaatagactaggatgtagctcagtacccattgaagcccttggtcccaaccccatacactgatgaattcatgtaatcctggtatatgagaggtaggggctagagaatgagatgttcagagtcattcttggctacattaaaagttttgagggagcttggggtaccacatgatgctgtcttgtaaggagctgaagacagcatagatgagcaaagacatcacgctttgctcacccttctctatctagaagtggggtgaattctaccgggctaagctgattccatctgttagcttatcctgtaccttctggttcttgccttttcaaatgcttgcttttgtggagccagccactgtggaggcaagctcgagttagttatttagacagttccagaagctggagaaaaaggctctgtggtgaagagcgcttgctcatctcccggtggggggagctgaatttagttcctagtagtgtcaggcacttcacaactgcttgtaactccagctgtagggcatcggacactacctctggcctctgtgggcatccatgctgcacataaataagagatacacattttaaaagagagaaattccagcctcctagccatcccttacctgtgacagattggggaagggatccgagcgaccatagttgagcccatactggctgacaatggatgagagattgcaggggctgtcatggtttttgacctttacttttaggatggtttattaatggtaggtaatcgtgagacagtggcctcagcattctctcgtgagagatcgaaccttgtcagcaaagcccacggtaggtgagcctttcctgtgcttgcacagctgccttcccggaagctggaggaggggagccacgcacaggatgggccggcagcatagctcagggatacacttggcggagacagctgagaaacagctgcagtgtggccctagtaagctgagagagtgggtgttttgttatcaactaaaggaagtcagaggctggagtctttatctgccatattcttagatgctatagagaaagaagtgttcttagccatagtctgtgctgggtcccagacagagtgtgtcaatgtgatcgatcacacaggtaaatggggaaggatttcttctcaacaataaagaatggcttagaggggggtgacagtgtttattttcaatcttatgtgcctttgtagtatagtgcccagaagcatatgtgtggtgtgtgtgtgtgtgtgtgtgtgtgcatgcatatgtgcttgtatgcatatgacatggaggccagacaagttcagatgcagttcctcaggtgtcacctatcttctttctgaatggagacttcgtttggctcaacaagctgactgactggtcagcaatcccgaaggatctgcctgtctctgccacgttatccaacacggagatgactggcatgtgttgctttgccctgcttttccccatgggttctatggacgacggaacttggatactcacactcacacagtgggaagctctttactgtccgagccttccccatagcccagcaacacagaaggagcaataattggactcatgaactgtctagcttaattacatttactttaaagtccagatatgcacacagagtcacaacacaactgcaaggtcataaaatacccatacctcagtgtcatctgctaagctaagctgtatgtacgtcagcctccaggagaaaaagagggagaggaagtggggagggggaggcggaggaggaggcagaggaggaggaggaggagaagaagagaagaagaagaagaaggaggaggaagaggaggaggaggaggaggaggagaagacgacgacgacgacgacagacagacaggaaggaaggaaggaaggaaggaaggaaggaaggaaggaaggaaggaaggaaggaaaaacaacaacaacagaatttcatttttgagcaacttggaaagatacaaaggtcagatgacatgtcccatgagtgatgtgcaatccccaggcagctggacattcagaagtgacaaggtggcctctgagtcagccttcctggtactatcgccacgttggggtgctgcccacacatgttggggttctgcccacacagccttcccaccagagcagccccagcagcctcgggctgtctctacctgttacctgcctgagacttcaggtcagtgacaccctatttgagaatgcgatggctgcggtgggtgaggatggggagactcccaggcctggccgtccaacagagttgcctgagggccctgaagtccacagtggcaaggtggcatctcctaactggctccacaggatgctcagtctgaccgtcgtcatctttcagtgtgctggagttaatgccagcaggaaggactggttaccttcagtctttgaccgcacttggcacgcccacaattctttcatgtttacttattatttatttatttattacatgtgcattgctacacagaccatgacagaggtcaacttcgtgaggtttccacactaagcacctcaccagccctggacacttcttaatgttaacccttaaggtgacaggttctttttcaagtcaacaagagaaaaatgcacacttcagtatgtgtgcagttttacaaatggcctgttagggtatagtaaggaaaattctagatttgagagccattgacctgtcctccatgtgttgctggctctaaacatttctgaattcattttctatttgtaaaacggcaatcctcgctagggtttctgttaaggaatagtatgaggtaggtttacgatctatgaagaggctaatgttctacaggtgtggttgactacaggattaggaaaacacttgctgtgggagttaagtctctagaccagcggttctcatcctgggggtccaccctttcaccagggttgtatatcacatatcttacaaatcagatgctttccgtcataagcataggaaaattaatcgttatgaggtaacgacgaaaataatttgatggttggggttgaagagctgtacggaagtgttgcagcattaggaaggttgagaaccactgtgccagacaaagctgagcataaaaccctagcccttacttacccttcagcccttaccctgaccctaaccctgagtggaaaaatcctaaccctaaccctcactataaccctaaccctaaccctaaccctaaccctaaccctaaccctaaccctaaccctaaccctaaccctaaccctgagtgtaaaatcctaacccttaccctaactctaaccgtaggtgtaaaattctaaccctaacccttatcctaactctaaccctaggtgtaaaatcctaaccctatcccttaccctttagcccttaccctgacctgagtgtaaaatcctaattgtgaccccagcacctgaggctttacacctcaaagaagaccacctaatgttacgaacaatcttcagtccgattccagcactttgtggctgtgggcagctaactgtagaggaaaatggacacctttggttgctagggtgattgatggggggaagccaagtccctctgtttatgtagcattattgagttggacctgtttcatcctggggaatatctcagtgttcggctcccagctgctcctgcatctctttgtgtagccaggagagaagggaaagtggtgtcgcacgcatgcatgcatgcacacacatgttaatgagcagaagggaaggcccctggggtatgaagagaagtcctgttagcctgaggtctctgctcagctggcccaagaagcttccagaaggagttggagtagtattttggtaaaaacgtaagcagtcaataaaactgggaagggttatcccaggatgatggctgaggcccccaagaaagacctgttctgcttggtcatcacgcttgtcctggagtggagtgggaagaacggcatgacctgggggatcagagtgtccgcttgactgtcactccagacagacatcttgctaatgtggcagctcttcactgtcctgtgacagtctgtccttcccagatctctgtaggctgttcatggccattggctcaaggcatctttgtgactcaaatgggaacatgaagacaacagtttgtgatttcagtgaccaaggcacatcagaaaatgacctaactgcatttttcttactcttttttaactgttaatgaccatgaggatttgtattgtttaatttcaaggaaaacggacataatattaaaaaaactcacattcagtattataatttagaagtctgatttttttggtgtgtttgtttgtttgtttgtttgaaacccttccccttattcttactctccaatgtttatctcctacaaggttgttgtcatatcttaactggatgaattcgctagattatagttaaaaatcagcagtttttatacacactccagacaactccactttcagaaaccatcgaataatactgaacaatgcctcaataaaaactggcaacctcagaaatattttcttcctggcttagctattttcaccttcactgtagtacgaaatatcaaagagtatttcttttctgatggtgtgtgtgagtgtgtgtatgtgtgttcgttcacgtgagtgcacacagaggccagaagtgtcttcaattgtcttctccaccatttctctttctttattttttccagacaaggtcacaaggtctttctctgatcctacagcttgctgactggcccaactggctttccagagagctcctgggatcctcctgttcctgtctcctaggactggtgttatgacatacgcgtgcacatggccttttgcatgggtgcccatgcttgactgagccgtctccagacccactttgattatttttaatgttagtgtctagaagttcacttagttctctaatagaccttgactcccagctaggtataaacagttcagataattcatctacaacatgtatctgtcacagcctgttccagtgttagccatggctgttttctctgtaaagggctaagtagtataatatatagtataacatgtcttatgtgatagcattatgccctcagttttgaatgcaaaaaaatggctcacagaatattttggtctctgccctaagtctggccagatattctcaacagaattctagctctttccatccatgcagcacactcaacagacggtcaactttttctttttcaatctatgagcacagaacatgtgatgtgtgtgcgcacgtgcatgtggaggccagaggacaaccttgggtgtcatcctcagcttcatcttctaggagacagggactgcctgtggcctaaggagcaccagttaggatagacaggtcagcgagctcccgggacgggacctccctgcttccacctgcctgcagtgggattacaagttcactctgccacacctaaaagattatacctgtgagctctggggactgaacttaaattcttgtgtttgcaaggcaaatgctttactgacttgactggtcctcctccagtccactttataatccgcaccgctggatgcggtgactgtgactttcaaatgttgggcagcgccactcactaactgccattagcattgtctgtttgcagggtaatcgttggccttcttcatatggcaggatcagatgggacctgagggaaatcagcgggcctctggagtgcagagctggatttgacggaagaaaggaaagcttttgggccttggtgagagaaatgagaaagttgggacggatatgagggattcaggagacataaagataaagcagatttcccaggcttgagtgtctccagaaggcaggaagctgccatgccgtgccatgctgtaccaggaagtcccagcaagagagaaaacctggaagcagttcggaggggaaccacaagctagggctctagctgagaactggtctctgcgaagtgttttaggtatatttttccacatgctcacacatcccagatccttgtaggagtgtgtggaaaggaaacctactgctaaatattatcatagagaaaagctcaccccaccatctcagtaagaggcatttatgaggtagactgtgattttggcttttaaaaaaaaaattagtcaaatgagctggggagatggctcagctcttagggcacttgctgggcaagcatggagatcagagttccaatccgcaggacccacatacatgccagatgaacatggcagcccatttgtaattccagcctcagaaagtagagactgataatctccacagccaaacttggaaacagaaggttcaaccccaggcctccacaggcacactctgtacacaagctcgtgaaaaaatggtggtggagagggtgtcaagacagtgagtcattttgaaactaactactttgcaattaggtaatgtgtctcatatagaaatggtgagacacccccaccccctgcacctgcattggtgtggaactgcaaccctggaaacctaggtgcaggactggaggtgttggcccagttgatactgtgtttctctacgtcatttatgaagccctaggttggatcccaaggaccacataagcccaacagcagcagtcacagcccttcttgggaggtgagggcaagacctacatggcaaagtttttgatctactctcaaaagaaaagaaagggccttttataactgtttttgtttttgtcctgacctgaccctttactttttacttcgaccttgggaaagcagtagtttaatcagtatattttgtgtagttcccctgaagctggctgtcagacccgtgggagaaattgaaacagtgaccacctgggaaaagtttggtgacctccagccatgatggcgacctacactaacttcaatcaaatgcggttagagcactcctgttttggtcttagttttgtttccataacttctagcaaatgtctctctgtggcagacctagcaatgtaaaactcatagaacctctggcaggaagaggctgtgtagacaccatggaccatctggcttgatggtacctctgcagtgtcatctcgagggatggaaagctttgggacaggagctctgattgccagtgatgggagagaatggtgggcatactcagagggtcctgtcagtgtcttcactgcctcatacagtgtctggtccttttaaatatctcctcatattttcagtaagaagtgtcaagcgctttaaattttatttctttaaaaagccttttatataactgaagtttaacaagctataacatttcctagactgtgtgtctggatattctgtttaattataaacctgttgccatggagaagggatggcacagacctcagggatcttgtggctgacacgggaagtagaggagccactgcacagttggatacatcttagcgcaggtacaggtgctccgtgcccatcccagatgggttgtcaagcacattcttgtatttcctcttcgaggtatgtgtccctctcaccctccctccccaacacccatgttggttgtattggctggttttgtgtcaacttgacacagctggagttatcacagagaaaagagcgtcagttgaggaaatgcctccatgagatccaagtgaaaggcattttctcaattagtgatcatgagtgggaggtccattgtagatggtgccatccttgggctggtagtcctgggttctagaagcaagcaagctgagcaagccaggggaagcaagccaataagtaacatccctccatggcctctgcatcagctcctgcttcctgacctgcttgggttccagtcctgacttcctttggtgatgaacagcagtgtggaagtgtaagctgaacaaaccctttcctccacaacttgcttcttggtcatgatgttttgtgctagaaaagaaaccctgactaagacactggtgtagttcaaagtcaagagctatataacttaaaagttctgagttcggcttggagcagaggatttcatattgagactgaagacctactgaattgatcacttctggaaaaagaagtactaagatgcatgctccccccatccccccccccacacacacccgaaagaacacttcctaccactgcttagaaacctgagagtttgtgcccttggtgtctccagtaagtgggccatgctaagaggctgggttacactggtatgttttcaagcatgcaggtgtcatggcatgtttggatgtactgtgaactttcaagtaccagagttgtggaattccccaaaagtcctaatgatgttgcctcagcttttggtacttaagaaccttgtccttgttcaacatgtttctgaggtgtcttgaaagggcgagccacgtctccatgtttgtgtaactaccataagaaattcctttctggagctgcacaactcttgtaggtgcatgggctgccctgaaatccatggctgcctcgagtatttatgatctctgtttggccccgttgaccacatacttgacacttcacactccttgccatagcattttctacttcaggggtaaagggggtgttccacttggtcttttgctaacagcaggtaggggacacttcttcaaaagcacaatcatcacaccttggaagcttaactacaaaagtatccctgggtcctgatgctgcacaaccaacttcatgactaactttgagatttgaagtagcaaagtgagagccgccagaagcagtaagggatttctttttgcaatttggagtttatcttgatagtttcttttgccagctaatgtgaaagtgacagattggtgtgtggccaggtgactttcaactcaaaaaaaaaatctggccttcaggactgctgagctcattttgccactgactcacccagcacgttgtgactggtcccgttctgtttagaaagagtgaagcgccaagtttaattgagggagtctaaaatcccctttgctttgagaaatgaggagcttggtgctttcctgcctcctgaggcactgccctaggttgattgcgtgcatctttggcatgtgagatggagtgagcgctcaccaccagctctgtgagcctatgtccgatttgcatccttctcttggttaatgattaccatccctgacattgccttctttctgctgcacacaagtctagaagattcacagaggatttaccactttcctacccagatgactgggtgtaccactaactcgggatgctgagtgtccccagggagcagtgtgcttcccgcaggtgtagcaggcagaagctgcgatggctccaaggcttccagtggcttgagatgctcacccaggaaagatgatgatttcctggggtttttctttccttgtagggtttcctttcttcatttttattctgtttggaagcattttgtgaactggatatcaatatagtaagaaaagtggattataaaacttggaataaggaccatttgagacacaaagaagtcttcggccggcatatatgttgcctcagtgaagagagtatcactcttaaatctgatccctgacctcagtttaattaggagaatgttatggtttatacatgcatggtccagagagtgtggaccttgttagagtaggtgtggcctcattggagtaggtgtgtcactgtggagtaggcgttaataccctcattgtagctatctagaagtcagtcttccactagcagcctttagatgaagatgtagaactctcagctctgcctgcaacatgcgtgcctgcatgctgccatgctcctgccttgatgataatggactaaacctctgaacctgtaagccagccccaattaagtgttgtctttataagatttgccttggtcatggtgtctgttcagagcagtaaaaccctaactgagacaggatgatgggaagggtatatagaaatactacaaattgtataagttacatttggatcatgaattattgtcttagtcactgttctgctgctgtaaagagactccatgactgaggtaacttataaaagtaagcatttacttggggatttgcttacaatttcagggggttagtccatggtagccatggtggggagacagatggcaggcaggcaggcaggcaaggtgctagaagggtagctgagagcttctgtcttatccaaaagttggagggacagggagacagagagacacagactgggaatgctgtggggtttttaagccttaaagcccacccccattggcacacctcctccaacaggccacacctcctaatccttcccaaaacagtccatcaactaaagaacagacatttaaataaatgagcctttggggctatctatagtcatccaaaccaccatagttattatcctaccagctccaaattacttttgtgtgtgtgtgtgtgtgtgtgtgtgtgtgtgtgtgtgtatacatgtatgtggtatatgtttatgcaggtgtgtaatgtctgtgaaggtaaggacatccctgtggaagccagggatcaagatttggtgtctttctttgttccaccccatctcactttttaattgagttttatttattagtgtgcttggatgtgtgtgttttatatgtggaggcatgccatggtgtatgaatgtaggtcagggacaagtctatggaattggttctccctttccaaccttatgtggctgccagggattgaactcaggtcatcatacttacaccgttactcagcaagtgcctttacccaccaagccatctggccaacccctccttatttttgagacaggctttcactgaacctggaactcatctgttcacgtaggctggccagtgaacttctgagttccacccatctcttgcccccttagtactggaattgcagacatacattgctatgctagacttttttacattgttgctgggtgcctcaaagttgggtcttcctgtttgagcacaatgagtccatcaactaaagaacagacatttaaataaatgagcctttggggttgagccatttctccagcccccaagtggtggatttattttagtgtaactgaatttgccattgtttttcactgtagatatctggaagttctactaggatctgatagtaacaatgctctcttgatcatgagtaagaatgcattaaggtgtaatgttagcttttgatacattgtagctttcctttcattaacttttttcctctatactgaagtcctagggaagcctagaggatgctcatttgcggtgtttcttggtttcgctttctgttgctgtgataaaatagaacactggcccttcattagaaaaagtcaaagtgtcagacattcagggcagtagtaacatctcacacagttaagagcatcagggtctcagctccattcctctgctcttgtataatccagggtcttctgtataaggaatgacgccacccatggtggctgacacttccatctcaatttatataatcaaggtacaccctgctcccccaagatgtgtccacagcctatcttggttatcctagactgtgttaacaactaaagataagtatcatgggttctctgaagtaatgcgttagctgatttttataatagtttcaggtcttcctcgctgtcttacataactgaattttaagttatataaaatgtctttgggtttatctcaatttcatactgacccttagtagggcttcttttatctatcttattttgtgttctctctttaaaaaaaaaatgctgttgaaatagaataacttcactttccttcttccctttccagccactcccagaggccctccctcaaatcccttccatggatgccttcaagttgatagcctttttctttaattattgttatacactcatatgtttatgtgtgtgtgcatataaatatatgcataatatataaatatatgtgtgcatataaatataaatccagtgtgttaataaatataactctcactgagtctttttgtcctttgtgtatgtatggttttagggttgaccattttgtattagacaacctataggggcctcatccttgggagcggctccctctctatcacctcgcactagttgcctggagttctttgtctaaggatggaaccttgtgaaatttccccccttcatgttaacatggcattgatattcccactgttccagtcttatttatgtagccaactcttggagatattgtttcacagccgacgctcttaaccataaatgcaagagtgtcatgtagctgtatttattggacctaggcctttccccctgaagatgtatacctataacatgtttcttaaaaatgttcagccacttgggccaacagcattccccacaaaaaccatagagtaatagagaaaatccaagtaccaaacacaagaaaccctccttttgaactgattgcttaggataatccaggtgactcctagaacatcatagattatcaatgtcaccctctgttgtctctcggggtttgaaggtgcacccctatagctgtataaatactcataattaaacccaggacatcataattcaacctggatctgacccaaaagcctcttttctgtggtttcgctaccatggttacagagaataccatgcaagctgccaagggaggaaacaattaaacagtccgacccagctgcaacacctgtgaaccatgacagtaaccagcatggtgagatgtgcgtaaaggtataagtggttacccttttctcgtgtgtgtgtgtgtgtgtgtgtgtgtgtgtgtatgtctatacaaatatgtatacagatatatgtatatataaatatgtatacagatatatgtatatatatatatgtataattgtttatatatgtacatattcgtatagacatacacctatacatatttgaatgtgtatatgcccgcctgagtctgtgtaaaccacatgtgtgcaggtgtgtccttgaatgccagagctggggtctaagcaactgtagaggggttgtgagctggtgagggagctgtgaacctcacctggtctactgtagagcagtaagcactcaactgctgagctgccactcagtcccctactgggggctcttttaagcccctgtagtgatcacactcatttttgtgaactttagcatcttctctctgaggacatatttctgttttttatatcctgccacatgttttggggaaaataaagtaggaccgtgggatatgttattctggctgggctgccttgtctggtctcagtggaagaggatgggcctagcccctcagagagttgatgtaccaggatgggggctgtgatggtttgtatatccttggaccagggagtggcaccatctgaagttgtggccttgttggaataggtgtggcctggttggaatgggtgtgtcactctgggtgtgggtataagatcctcaccctagttgcctggaagtgagtcttccagtagcagccttcagatgaagactagaactctcagctctgcctgcgccatgcctgcctggatgctgccatgctcccaccttgataataatggactgaacctctgaaactgtaagctagacccaattaaatgttttgttttgttttgttttgttttgttttgttttgttttgttttaagacttgccttggtcatggtatctattcacagcagtaaaaccctaactaagacagggactacacgtggaggggggggggtcccacccactcagagagaaggagatggggaaaaggattgtgggagggatgactgggacggggcagtgagcaggatataaagtgaataaataaaaaaattaattgatggctcagcggttaagagcactgactgctcttccagaggtcctgagttcaattcccagcaaccacatggtggctcacaaccatctgtaatgggatctgatgtcctcttctggtgtgtctgaagagagtgacaggtactcacatacaaaaaaataaaaattaattaagttattaattggaaagatacccaaagattctctgggtaagaggtgcagactttgtctttttgttcctttgttttcaccatttcagttgtccaaaatcaggtggcttgctgcctggtattattatgtataacaatgacatagtaaatacttgttgacagaatgcatgcattaaatatgcccttggggccttccttaaaaaccaaaccaaacaaacaaacaagggagcttctgctgttgcttgtcaattgcaggaagagtggccttgcgtacttcaaggttgtctgtgaaggtcagtgctttgccatcctagagttaattaaatggctcctgctacctcatgttgatttcaggaaagtttttccggtgtgcttcctcagcacgacatgttccttcgtctcagctgtccgtcagcactgtccagaacgcccaccctgtatagaattcatagcctttcccttttagctctgtttcccttacagacagttatgtttccatgccttctgtcaggtctctctctggatgggttcagttattggtcaattcggagagaaagaaaccctatacaaaattgcctggtgaagtctagaaggaatggtcagctctcattctagatgcttctaactagtttctggaggaagtactacattagtccccctcttcccagcacacatactaacaccctttccccctcaaacgctagctctgacagggttgctatcaatcaaatcaacttgtttgtggaattaatgttaaaccccaagtagatagttaatgaactgtttcccctcttttaaagccatttttaccctataaatctcagagtgttcagtgtgctgttacctgggttgctcagccaatgaagcaccagatattaagatgcagctctctcaccattgcaacatctttagcatattttctaagtagctcctcatagttctgatatataaagtactgagttgttggtacacagttcagaaacattggaggttttcagatatgagtgcacagtctcactcagtgtcaaagtctatcggtagtcattcatgatggttatatttaggtctagagtggcaaggaatataaatgcaattaaaacctgaacatcaactctatgatagtcatgctaatgtaaatgtagaattgacatagcaaacatttaccgagtatctgcttgtagaagtacagttctgggggttggagagatggctcagcggttaagagcactggctgttcttccaaaggacccaggtttaattcctagtacccacatggcagctcacatttgtctgcaactccagttccagggaatcggacactctcagatataggttacaagcaggcagagcaccaatttgcataaaaaatacaaatcatgaaaattgataaagatgttctgttttttttttataaaaaaaaacaaaggacagtagttctagataaagttctttcttacctttgacatgtgatatgtgcagttatgggtgcttatgtgcatgtctgcaggcacggggtctgtgaatgtgcatgctgagagccatgactgacaagggaagtcttcaatgattgttctctaccttactgattgaggcagggtccttaagtcgtgcccagaattcactgaaacaggctggtcccagtagccagcttgccctaggcatccctggtctctgctttttgcacactgcaattacaagagggatgccatacccagccaacatgtacatgggtgcttggggatccagactccagtgctctgcttagagggtgagcactttacccacggagccatttccctggcccctggctttgtagagtttaagtagctatcacctcacttctcccagggccagagtggccatcagtatatcaacacggctacaaattcaagacattaagttgacatctgcaaaccttcactgtcattttctgaaaggtgagtgttgagaagcatttcaaaataccttatagatcatcccagtgttcaggaggcagaggcaggtggtagtttgagatcaggctggtctacataatgaaatccaggatagacggggtaaaaccatgatacatcatcaccatcaccaccatcatcatcatcatttaataccaccaccaataataataataatagtagtaatggtggtaaaaacttcttaggaaacatcaccttttctgtcttgctaaactgtttgtggtttaatttagttataaacttccgccagtgaattatggtttaggtatggcagcatcatagaaagatgaaaaacgacatgcgtttagtccagtccttgtcacgttgacaaagctttatgagaaatgaaagcaagggtcagcatgctgagagctcctggagtcagacggttccagaagctgcagtgcggcccagggtcaggttcatagcacccgggaccactcctgaggagggagtttggaagagctggcacagatagaaaaagccactgggttcgctgatgcatattgggcgcagtgatgtaggctacatcattttcacctcatttgcctgccctgcaggtagaaattatatttaggatcgtatctggtggccaggagaggtgctcctagaaggtttagaatttctaggacattttactctctttctgctacagtgttaaacaacactttggctcacctagaatgaacagctgcaaactggcgttatcacagaaggaatttagagtgcccatggcctttgagaaactgggagccgtattttgaacaagtctttaaccccttggctagactcataagttgatgctctttgagtttaattttatcctcgtttaactctctcctaaggagcttaataaaggtctgtatgttcacgcaagcagctcttcatacagcatgaaattcccatctcattgataaccgtttgcccactgccgaagaattcaataagacagaatgcttgacttgccgacagatagagggcaaagtgtcactctttgataaaccagggaacagaagtgaatttatgtaaaagaagtgcccgaagagaaaggagatgcagtttctctcctgatgtgtgcttccttcgtggagagatcatagcaagaagttactgtcatagtcctagagtagaccctagttcacaagacgacattggtcctcacgatcctgagttcccttctgcaggacaggctggctgaagaacatggctataggagttagattcagaaagccctgcctttacacgaaggttccctgctcctgttctaaccgctcttgaggatctagagctacctaaaaatgtttaatatataaatatttttgcagtgtgaggtctttaagaggttttgtggggagtgtttctacttgcttcctcatgcatcataagttttgtccaaaggaaaactccagcctcggtgaacagtggagtcattgtgtggggcttgctttgagctcaggtcagagacatgcctctgacaagctgcatgcttgccatgaccatttgttctgcctgaaagaacaatggtagacaaagaccagagctcactcgctctgagacaaagccgagtgagtcctcttagacctgttgaagaagaaaaatgaggagggagccataacaacattcatgtacgtagttcatcttccacgtccctttacatgcaatccgatcatagcttgaatgcgacaaggaaataacctttaaaaatcaaattatagtagagctctgctaattcgtgcctgactgatttgccagcccagtagttcttgtagaaatcatgctatccctcaactaaatgtcagagggaaatgcagtattagggtatagagaaggctcacattatctagttcaaggctcatgtgcaaaatgatagatgtccaggtattgtgaccatgaccctgtaagagcagaaatagagccacaaaccagtgaagaaaagggaaacccagatagtacttttttttttaattgttggatgcttgtgtcagatgttagacttggatattttgtgtcaaatagaaatgctagtcctatgggtgggccccctagtttaagaaaacctgctgtcaaatacaggagtaagctgtggaaacgagtgtctgcctctgtaagggctgaccatgaaacaagctagaatctcagagaagtttcatagtattttcagacagaatcttgttgcgtgcaaagaaataaaaagtgagccaattaactatgtgccgtaatgcgtggacagctgccagcttcagtttgctctttgccaaataaaagtgcaagggtccattgatactgtttccaaaacccttaggatgaagagctaccagatgtgtctgagcagcagaagtggtttgttttgtttttaatactgggcagatgtgctgcactggacactttgccattgtgtccgtgtggcaatcagaggacaacttgcaggagtcggttcaaccttctcccatgtaagactcagggatccaactcactttcatcagacagagcagcaggtgcctttacacattggaccaactccccgaccccaaaatatgtctgttttaattgaagggtgggaactaggtcagattgttactttgtagtataccctgccccaggctggttctaaactcaccatcttccagcctccgcctcccaagtactggaatttcaggtttgtaccaccacccctgacctcggatctgtaattttgtactttcaaaatatggctctaagccacccaccgtcttgcacatggcctgtggctagtgtgcctcttgaggtgtaagatgaagccccacacatgctcaaaggcccattcctccagctacagtagccgctgccagggatagcaagagaagcaagaaatgcttcagcaatgagggcaaggaagcctccacttggcacctcctcaccaccaagcatttacttgagtgccttcagtgtcctggagaagagagtgtgccctgtggaattcgtacataaaattacatagtacaatagaacattaatgtatatcgtacattaatttatctacccctagcatataagcaagtaaataatattaatgatttacaacattaaccaacaatcaacatactatatgtacttcaacatgcctactaattactacattaaattaatgctttacggacatatctgtgttatcagacatacaccattatgtcataaagtcttcttttccatatgactatccccttccccatttggtttattaatctaccatcctccgtgaaaccaacaacctgcccaccaatgcccctcttctcgctccgggcccattcaacttgggggtagctaatatgaaactttatcagacatctggttcttacttcagggccattaaatgcgtctataaggtgctagagtgtgacatgactgttgcattttccaattacacttcaagttaacttcattgtaccgctggctttgtgtaagattgtgtaaatctttccatagtaaaatgaattgccttagctttcaggaattttattccttacccatcaagctcccagtatcaaataaagtaatatagttgatatccacctcatttccctgttaagacgacagctaccatctatctaacgatcagacatgtgatacattttcacaaacctaggaatcgtcactgaactttgtatattcagagcctgtgcctgcttgtcacacagcacaggcattaaatgtattgtttgtttgtataagtggatgaatgaacaaatagaagagttgactattatcccaaccatgtaccctcgggtccaggaatcagaaagttcaataaggaagtaaagcacacaacattcttttgctggtcttattggcctagagtatttattgtgagagcagattcacagtcattgtttgacagaacagtataaatagatgggtagccgccgttggacctgacgtcactaacgggaaataacaacgcagatgacgcttctgatcctctgcaccacgcactgccaccagtgatgaaatcctgcttctggcaaacatgaaacagttctagtaccatggcttggcagtcgctcccgtgtatagaagcagcagtagccaaccggagccggttgaacatctcaaaataatcccttatcttgttgcacttgaaaatagcatccatacagagtaatatcttagagaagtggcagcttagaaatgaactcctactgtgctttcagcagcttagggggaatttatcttctcccagatgggacttggagcaaagggatgtgacatagagcagtggccgggttctctttgatggaatgcggatgttcatgcagggggccagttctcatgctgtgccatttgcttacaaaggtagcatgctgttgttgggtttttttattttgtgtgtgtgtatgtatgtatgtatatatgtatgtatatatgtatgtgtgcatctatgtctacacctgtgtgtccgtgtgtatttgtatatgtgtgtgccctcagaggccagaaaagggtatcaatccccctggagctagagttagaggcagttgtgaaccatccaacatggctggtggaaactgaactcaggtcctctgggagagcagcatgctctaagccagtgagccatccatctcccagccccagcgatggccaatgagaaagccactgtgcggcccattcacagagacaggtgtactggggtaccctaaatctaagtggcttgatggacaaggcattcatcactcaagagactccagcacaggtcacattggtcctgtgaccacagcagggacccaggacctgtaagctcacatttgggctgatacttggtgatacttgtctcgggtccactggccatagttagcgacgtggcctgcctgccagcaaggaggctgaaaagtgtgggactgagagagaagtggaagatggtgggcagaatttgtatattaaagtctactggcttgaggtgccctaagcccaacaccatagctgcagcctcagaacccacagttgtctaaccacatgtccactggctgtttcctatgccccaagcatgaccgaggatggctgattctcccagaacatcatttactggctggcataaccaatgcgtaacctttgcctgagaaggagaatgtaaacccatctttacatttcttatttaataaaagattaatctcatctgtggattttaagacggaagaacagttggatgaaactaagcactgatagttgttgttgtgttttataaaaagaaagaaaaagccagggatatgtttggtagaggtgccgtatgnnnnnnnnnnnnnnnnnnnnttaccagccatacaatgggtatagtatggaatataatttatttagggcatggcaggtgagttgagggagggcagggagagagagagagagagagagagagagagagagagagagagagagagagatgggggcagggagagagggagaaggagaggggagtagaggccagccataaacacctggggtggggggatgggaagagaagggacagagagggagagagtaagagagcaaggaaggggtgaacagccccttttatagtaaaccaggcatacctggctattgccaggtagctatgggtggggtggagcctagaaggaatgctaacagttgaaacgggaagttccccatagatatgataaacatttgccaaaccagtgggtatggtaaacacttgccaattatcggtagtggtcaagataaaagcatagttggttttcctcacccccttcctctgtgctgccaatcacacccttctgaacagtttttctcactgagaaagaaaccagcttgcctggtagagtaatcacagcacccgggaggctaaaacaggagggaatacccttggctacagaatgagatcctgtctctaaaacagcaaacagcaaaccagttatcttcccttgccagggcataaccagtgagagaagttacatgtgtaagtgctgtggccactaattagctgtaaccctcaagtgggaaagccacataaacgcacaggcgaacgatcaggcgaacaatcgaatgaatgaacgaaccacacccaaggcatccacaaggggtgccccattcacaccctaaaagaatagagattagagcttcaaggtcacgagtgtcaaagggcattaaaccaaatgttccctccaggatccagatgactttaatgctcctcctcagctgaggcaccccaaccctgagtgacacccttcatcacctgtggccaacactgtcctgtggcttcagtcttcactcggctgttctgacgtctgcagacatcccttcccctgagggtgggcccagttttaggtggatggctacagcctttgaccctttggttttctcaagctctgttacagagctctgctacctctgcctgaggttgtgtggagggttttggttttggttttggttttggctttggctttggttttttagctacctcctcacctgtccagttgtctactttcttcttgggcacactgggccacacatacacaagacacacttcctctactccgcctctggttgtattttttttaacctgtaactatattaaagctcattgagatgtgtagacttctggtctggttggttaactttggtgtgtgatgctttttttttttgcaaaatattttaataataaagtttttttttaattggaaagatgaaaagtggaagaaggacaggaagacacctgtgtagttttttgcttttttttttttaaacaactttagtttactgggagctcagcgtgcctttgacataggatggacctaaaataatattttcctccaaaatcatttcctgagttttcattgataatataaaattgcttaaggaccaggaatggagactaatggttcaaagaaatatgcaacaatacaaggaaaaagacttttaatcgagcagaattgattgatgattgccttgcatctacagtaatggttaatttttttttcatttttgaaataatggtgtgtgtgtgtgtgtgtgtgtgtgttacatgcatgtgtgggcacatgtgtatgtggttatatgtgcatatgagtgtgttccaggacaccaaaggcaatgtcacatgactttctctattctgctctaccctgtgttttttgagccaaggtctcttcattgaacctggagctttaccattgcatcgaggctggccaggaggatctacctgcctgtctccatgcacaccaccagcccagctctggggttatatgtatgatgctgcttctgtgtctggctgggccactagggcttcaaacccaggtcctaatattcatgcagtaaacactgtatctgctgaaccatctgcccagcctcctaaatctctgtattctttcctaactggaggatcttgctgtttagtacagttattctatgaagataaaattagaaatgatttctcttcctggccacttaagtgccagtgtaattaatgtaccatcctagctgttttgttttgcttgtactgtaaagatacaagtcttttagatattaatgaatttccctttttagcagtaagaagaaaactctgtgtacaaatgcatttgtcattctcccgagtccatgttgttaaaatgtgcagtaattttcaccacctggactggtgacagcacagttcctaagtagaccagccatgtagttggtcacataggtaaaattttaacaatgattcatataacctagtcttcgcaaaataccttactcatatatttaatacttaatttctagcatgttctgatttctgggtgaggagattttaatgtcaggaaatctttcatacgttggtttgtcttcagcgtcacaaccccaccccaccccacccccacccccgttttgctctgccctttacagtggcaggtagggaacttctcacgtgtgcacaggggactcggagcaagtcaatatcttggaaatgtacaatgcagctttctgcttcctttgttcctgaaatagactgaaggattccccttcccaccaccttctggcaacatattccttcttggtttaggtagccaagataaacgaaaaggtctctgtaaccctccatgggttgcatctatttggtgtttgctaattttataactgcatcattgcgttcgttgttctggagaaagtcgcctctggggtgggaaggaaatgcttccactcaaagcctccaaatccgctcttctttctttttttttttttaaccaagcagctgttcgtacagcttaggcattctgaggaagtggctgaataaaagtgtaacggttccgaaatgagccggcccgatgccgttccagcagctagcagctgcggagatacgatttctgcaccgcgggcggggacctgcttttctgggttaatctcagcatttcacatttggcggacactcaagacccttctgggttttgttgttgtttggatttggggatgtgcgttttgtttggttagctttagttctgttttccgtttatgttttgcggccttagataggtgcaagtcgttgaagtgatttttttttttttttttgcatcttatgtttgcgtatttttttttccgaccatgtgtctgtccctggcatgtgtgcgtgagttcttaaaaatgcgtgggtgtgcgtgttggagcagatgtaagtacatttgttttcatatggaggcccaaggttgagtcgaaaatctttctctctttctgccgatcttattcaccgaggcatggttatttgactgaatacatagcttgacattacagctagactaatagccagcttgctctgaaaacccccccttcttgccttctaagcagaaaggcaggcaggccacctggcatttgcataggttttgtgactctaaactccaagcctcctgcgtgctgcttgtacgaggagccctttaaccagtgagccacctcccctgaccttgtgttctgatttaattaatgatctccagcaagcagacatataaaattaaactattataacaacagtccccacaaatacgtttggatgacaagtgcatttatttttaatagagttgagaggcaagagtattattggggttctcggggtggagcattccacctctgcacgcgtgcattgtctcccctggtatggtacatgtgtaacaacggatgaagatgcatataacacaagggttcattaccatccaagtcacagttgttgttaggagtattgtcaacccgagtgacgggacaaggagaaagcagtcattgtaagatcttagaggtagcccagatagattacttactttttattgcactaaccaactacctaacagaactcacactaagagggagactttattttgcccagtagtttcaaatggttcagtccctggctacctggtctcatactcttgggcaccagcaatgtgtgctggcagtaggtcctttcttcttagacaggaagtggcactcatgaagttgccagggctacaaggacacatccctggggacttacttcctgagttcttttcattgcttcctaatgctattagtattacaaatttctaggggattgatccattccttggtcagagccctcttgatctgctcatttgtagaaatatcatcacagacacgctaaccccttagcccagcggttcttgacctgtatcaacattacagttatgaatagcaacagacttaatttcatgccttagagtgactacaacatgaggaactgaattaaagggtcacagcattaggtaggttgagaaccatggctatccttcatccaacctggttgacagtaagttacccaccatgatagagcaatgttctgttccttctgggtggacctcggttgacatagccacttacctactggaggacatcttggttgtttccatgttttcatagttgtgatcaaaccgctatgagcttcaaacaaataatcaaatgaaattgtaatacttcggtattgacactatctcgctgatcatgtagcatcagcaagtgcaatctaaaatgagttcattatcttactgagggtagtctagtactgtttttctggcttatctgtttctacaagtggtgaagaaagacagttgaacagattatacattaacaggtatacaagcagctacagccatgactgagtatgtggggcacataaattaaaaataaaaatggccaaatgtttttgagaacgaatctgttgataggacaagaaaatgtccagggtttttgatgaggtatcttgacagcaagtgccctaactctaggacatccttaattcaatcacacctgcaggcactgtcttccttgttacattaggacccgaatctttgcaggctataacctagcttcccatttttcacaatcgtgcgatggttttcctgaagaaaagccaaagtatcccagttgagacctgcaggagcccattgtgtccccaaggtactatggggtactatggggtggtgtccttactaagcacaagtacccagagagatggaaggtactatggggtactatggggtggtgtccttactaagcacaagtacccagagagatggaaggtactatggggtactatggggtggtgtccttactaagcacaagtacccagagagatggagattcgtaaactctgtttcttacaacaacaacaacaacaacaacaacggggggggggnnnnnnnnnnnnnnnnnnnnnnnnnnnnnnnnnnnnnnnnnnnnnnnnnnnnnnnnnnagagagagagaggtgtgtaagcagttttatgagggaaacatgaggatccctggagccttcaacgagtgtctgagcccagtggcaggctgctctctctgtaatagctttatgaaggggcacattcagggagtggggggctcaccaggttgatgctacttctcaaccacttcccttccaacactgtgatttttttttcctccattgtccctaagattccccctcagaaagtgtatttgctgtggttacttcccccaagatccccctggagtatgcttcccagaatttagtcactgttcctcttggtgtttctctgatgatgccatagtctgctctcctgttgtccctttctccagcgaaacaccggttctaattcttgaagggaggaaactaaagggcgatgatcccatgttaacagacatgaccagactcaccttgataacagaatgtaagcaagctcaaggaagtctgcgtcagcagcagcctgttaaaatatgtgtcgccatgttggtgggaaacaggcctttaaccccaacatttgggaggcagagacaggtggatctcagtgagtttgaggccagcctggtctacagagcaagttctaatacatccagggaaaccctgtctcaaaacaacaaacaaacaaacaaacaaaccaaaaaagtcatgtgacacaatgttggacactatgatttaatgcttgcttgacctttcttcatgaatgtcatacgtcatagtgtaggccatgaaaatattccttggaaagagcaaggctgttgtgattccttcgactgtgttaagaggacctaagtttctctttgtaacgtggggcattggaagaatccagggaggcttgatgtccaacatctcctgggaccttgatcatctttaagtctacagggaagtaaagaggacaagatgagcttgtggttgaaccctggatctacatagttgtccccactcatggtagggcgagctacatgctgatacttgagtgaagcacgcctgagattgctaatagcatctccattgaagttattgggagtggtttcattggaatggtgcgtgttaaatgtgtataatgcagcattgtagattggcgtttactttctctctctcatgtgtttccttaagtaaggcacatttgtggactgggagagtttaacggctctctttcccatactaccctaagtcctcaagcattgtagcacagtatggccaattaaacacttcatgggataaccagtccaccttggatatagaccgaggtcctaaattatattttatatgacagcgtctctctgcgttttcatccccctggacatctcaaattgcagaatagcatatttcgtccagggaaaataaataaataagtggttatgttgcagactgttgctaatggcatttggacactctgtaacatgactgaggattccttggcgatcacattgatgaccgatgccctctaaatgttaccttcagtcaaattacctgagtgtctgtatgtttgtttgtttgtttgtttgtttattatatgtaagtacactgtagctgtcttctgacactccagaagagggagtcagagctcattagggatggttgtgagccaccatgtggttgctgggatttgaactcaggacctttggaagagcagtcagtgctcttaaccactgagccatctctccagcttgagtgtctgtatgtaatgaatatgcacagctagctgtgtctgtgtgtgtgtgcatccagagagagagagggggggggggagagagagagagagagagagagagagagagagagagagagagagagagagagagaggaaggaaggaaggaaggaaggaaggaaggaaggaaggaaggaaggaaggaaggaaggaaattcttcctgggatgcctgtatgtgcatggcatacatgaggaggtcagaggtcagtgcctcatactttccttcatggttgtccacctttttgagacagggtctcacttaacctggtactcactggttagctacagtagctcacccctcaccccagcactggggtgacagatgtaccctgccctgcccagtattttatgtgtgcctgggatgcaggctcagttccccattctctcacagtgagtgcttagtgactgagcctcccccccccaccccccgccccttacattaatttcaatggagagatggctccacagctgggagaaccagatcatcttccagagcacccagattccattcccagcgtcccacaaggcagatcacaccgtctgtaactaaaatctaaaggatccattctctcttctggccttcgtgggcatcaggcatgcgtgtggtgtagagatacatctgtaggcaaaacacccatatacataaaaataaatctattttaagtagaaaagagaggcttctccctccccacactgaaatgctgattgtctgcatgtaattgcatcctgcataatataccctatgatacacacaatgcccatcagcgccttcttccacatacctttgcacagcacaccctgtggtatataatgcgcatcagacgtagggggtggggggctannnnnnnnnnnnnnnnnnnnnnnnnnnnnnnnnnnnnnnnnnnnnnnnnnnnnnnnnnnnnnnnnnnnnnnnnnnnnnnnnnnnnnnnnnnnnnnnnnnnnnnnnnnnnnnnnnnnnnnnnnnnnnnnnnnnnnnnnnnnnnnnnnnnnnnnnnnnnnnnnnnnnnnnnnnnnnnnnnnnnnnnnnnnnnnnnnnnnnnnnnnnnnnnnnnnnnnnnnnnnnnnnnnnnnnnnnnnnnnnnnnnnnnnnnnnnnnnnnnnnnnnnnnnntaagagtcaaaggatagctattgtcactatttctcatttgtaatttagtctcaacatgtgcttacctggtgtacgatctgctatgtgtcccagtaactgcccttagaaaatggtcacatctgtgctagtgtcttcttgagatttctttctagaaaaaaaaaaaatgctcacagcatagccacaccatcaccaccaccaccacccactgtggaactgaagtttttacagagtatcagcagggaattcttatgtgacatgggcaactgtgggccgtttgtattttctagaatgttctcactcatgaagcacgtagcctctacccattcattcatttgcaagtgtatgagctcagagtgcatgtgcatgtgggttttccccgagttagggccacacatgcatacaagcaaagttgacctccggttctttccttaattgctctctatttattgagaaagggtctctttttttttaatccaaaagtcacctgtcagctagtctggctagccagcttgctcaggggatctgccgtctgctggctgagacctgggatttcaggtggctgccatccatgtcctatgtttatgtaggttctgggtatccagcctcaccctggtccccacttttgttccataagttctttatccatcgagccatttccccagctccactctaacccccatattatcttctaaagaaaaaaatttaaaaggccactctgaaatccgcagagagtgctccctatcttgaatttagacccagttctgtaatcttttatcttggttccttttcttacatggcatcccttcatttatttactttctaagggataatgaactctgtaacatctcgttccataatttaaaaaacccaaactgttacttgttttgcccccacagagtagaataggatgtctccaactgaacatgctgaactcttcgcagtacacaaacgaggaggtctttggtaggagcccagacgagctcacccacagggtttgctgaaaatagctgtgtgctttccagttggccggtcctggcaggagctcgctgcttatcctatttctcaacagtgagtttaaaacattcactccatagcttcctaagcattcggtgtgaacttgcatgagcttcctgcacacggacgtacaagaggtctttagtccccgttttcttggtcgcgagaaggcccagagctaatgattaaaccaactcgttgattctgcagctgggaccagcaccccaagctctaggcataccctaatcccgtaagacagtagtgtgtctcaatctgtaggtgtcaaccattttggggttggtcgaacgatcctttcacaggaataacccaagaccgtcagaaaacacagacacttacattatgattcacaacagcagcgaaattagttatgaagcagcaacaaaaaataattttatggttgaggtcaccacaacatgaggacctgtattaaagggtggcagtgttagaatggttgagaaccactgcctgaagagatctttccctgtaccccattactggtacctgtatacctggcctttgtatttctagtgggcagtggctttcttccttttctcttgctttgagccatcagtacaagacatccaatgcaacagaggtgagggtcagggctaagcagtaaagtgaggcaccggggtgcaaagtttaagtaggtgagtcctaccatcattggccagccctgttgtaggctttggtagcctcatcctggtgggcattccaaacagctgactgcacatacactcactgcaatcacaaggatttgtctggttgtcgatcgtgatccttagaaaagaaaaacgataggggagttagcgtttttctccccagatttgtcctgtgttttgggacatagcaagtttagcacactcattctaattgtggtgacttgatcattgaaacctactgacagggatgtcttttccctttggccccaatccccttgcccttgttcttggtccttcctggctttgatggcaagaccgctgtgtgcttctgactagagcttgacgcccggttcagtaactgctttagctcttatttttaaacacctcaggcaggcaggaagctcacctttgatatggatctctatggattccttacagccatatgagtgacctgtctcaccctacgttttacccagggagctttggtgttgtttatttaagtattccttgggcatggagggaaatcatctggaagataaaagatctggaagacataagatctggaagatataagatatgttattcttcaaataagcagttaagtcagtctgtttcatggtacaaactaaaacccaagtgactggagttacagagttcaagtgtgagcctcttccttctcccctggcgctccgaggaagggctaggagttacagagagatgggatcatagtgaccaccaggagtttcatatgaaattgccccaaaatgggaaaggactccttccagagtgggaagggggtgggattatacagtgcccacctctactgaaaggacacttaacagtgtctggagactcgtttgattgacctaacagacaagctggtatggtatctagtagaaggaggagatgcttgcaaacacagtcaccacccccattctagcacacagaagactctcagccaaaatgctaacggtgtcacctacagaagtccccattacagtagcatttattgaacctagttgtcccatttaataacaactactgtgcacagtgcagccatttttatccttgctttatggatagcattgacctttggcgtagcaactaggaaacttgcctttgcgtatgaatctggtctccgtagatatagggctttgatgtctggaagtccaacctctgcactgcagaggaagtgagctgcccaccacagtccaaattaatagggcaggcagccactccagagaggcgtcaggagacatgactcctaaatgtgcattggtttaatgactggagttctctcttaaggatcacatcctctgagtctattttaaaacgggatttgtcatgttggttccttagccaggcagatatcccttggccacaacaagcaaaatccctgggctttgtctgtgcacctgtgagtcttattcctataaatacctcaaccctattgggccagcgggctaggcctccaaataggcaaccagaatcacaccccgcccttgtctcctccacattcctgcccgtagttatttatagccacatgtagaaatggatccacctatttcttgtttgggagaataacagaggctggaaaggaataggaagggaaactgaatctttatccccgtgtttcccaaccttcctactgactgctgtaaccctttaatacactatctcgtgttgtggtgaaccccagccataagttatttcattgctacatcatatctgtaattctgctgctgtagtgtaaatatctgatatgtaggatagctgataggtgaccccgaagggggttgtgacccacaggttgagaactgctgctttatcctgttatgattctagttcacggtcaatttgtaagcctctccctcctatagattcccaggttcttgccagctctggccccagatcattagcagcaagtgaggactttttgagacatactagcctcagcatctgtctgtcagagagctgatgtctaagctgaggtgtgtgctatgggcgtagaatatcacagtgactacggtatagcgcctggcatcttacagatacggtgctgttctagaaagactggaagatggcctcgggtcccaggagggtatagagatcactaagtggtctttactctgtgcctgaagtgacatctatctactacagccccaaactgtctctggatccttggaagtccttagctgaagtagattcctctcaagacacacaccaaatgagttaatttcccccaaagccttgaaaattctcctccaaacactgtgtgtaaagaagggaaatctctcttttccgtgtttctttcctgacttaagaggaagaagttctaaatcttcgccgagctttgagggaaactttttaattacctcattaatgacctgacttgatgatggattttgtgtctttaaacagtgtttctgcttcgtggacctcttaaaaaatgtgaaagctcacttcttacacattttaaagttgacatctgtaatttatcagtagtaataataattgagtaatttagtccaatagttgcaaaagctggctaactttatgttgagtgatgcttgtgtatttcaaacctagttcagaaagtacccaatatgacaggtaggctagtcccatgattgcagacaccacttattttgaggaaaatatctactataaattgaattagcaaagccattctttattgttaaactaattgaccatgtcggagttattttctggaagaagattcctgacttcatcttttaaagcaagtacaaagaaaaatcaagaggatgcaaaattattattgatctgtgaggttgtcacctcagtaaaatgaggtgtgttctctttgtttcccgttggcccttcatttttccttataggtgagaatcaggctaagaagggctccttctttggaaagcccgaggctccaggaagcaggcactgttctctggcacagcggcgatcccacgggaggatctaggtggtctggttttgtccttagtcaggtggcctggaaattttgtgtacgtccccagggtatgcatgttcctgttcaaagaattctgctgtcagagggaagggtaagaaaaataatttaaaatgacttagttcattctcttttctcaagcttctagtctcctcgtctcattcatatgtgatcatgcaagtgaggagaggacagacccaggactatgctcatggcaaatatacttcaggttgtgtttgcttgaaattcacagccctggtgctgtaccttccaagaggctgtggaggaggggaggcagcatggtcagctagggttccctgaagacgatagtatgtcctcaagactgtgaactgtcagtgcccagctaactgggttcatgttccggctgctgccctcctgttcagtagcccacagaaggcctccctcttacccttctccgggcagtgctggcccccgtgagtgagctacatgggaacttacattccttgcggtcttgaggctctccctgtagctcagctggactctctcccctgcaaactgatggagtccactggccagagatgtgactgcagccaaaacatgaccagaggagaaaagagacctagaaggatctacctaggatgccaaagctcatattacaaagcttgtttcgtagagccctgaggaaaagcgaattagtgtccttgcataaacctctgtgagtctaacttagcgtcctcagtcatgaaatacccaaggatgaatgaacaccctgcccgcactcaagctactatgtcatacacagtttctggctcgcagttctccatatgtccaaaccatttggccagccagaaaacaagatggctcattggcatctcgtgcactgactgtgaggaagggcctttagtgtcaagcacgggaatgaagcaaaatagtaaatgatactgaacccatcatatgcttttgttcattatcccctcaattcatactgcttcctgacccttcgttgtttactttcgctattcgctattagttacccacagttattctattccttggtactgaagtgaagagacaagacccagaattctcctttccttactcttacatacccaatatttaaactggcttccaaattatactttaaaacttcccaagtgaagtttgagaccagtaccctgagaaggtcatactaaaattgaagacaaacagaacctcagcactctacgtccatagtcagtcagtcagtcacagtgtgagagtatgcagcaacacactgtcatttagccataagggtcagcatccgaggggtggctttgtaacaggtagagcttgcagaaattttcaccttgttttctgcaggttgtattctttgaaggttttttggttttttgtttgtttggttttgttttttgttttgatcttgctctacacggaggtactgagggaaggatgtaagcgcagagctcagacatctctgcactgtgttccacaaggaaaactagctttatagaaagtgtctcccaccaggaaccatgtgccactagatagcagtgaagcagatactccagtgaactgtgaagccagactgtccccccagatcacagaaggagacagagttctcctccctcggaaaagatgcacagttatagattatagttatgaacagttatcagtagattatagttagtgttccttggccttgcctgattaaaaaaacaaaacaaaacaaaaaaacttgtcttcacaaacagggacagggttataaggaccatcgagtcttggtttcccagatagctgtctgggcaatggggagagagacgccgccatactttcctatggtgtagactactacctcttgtcttccatattgcgtatgccagagtgaggatgggagcatcggtcttagaggattagtcacaagtggggacaaggctccagctttaatcaactgcctcaacctgttgcagcccagggggggtgcgtaccaagccttccgttcctggaagacttaaacattcctcagctgctctcaataccagcccaccttcccagaatgccgttcctgaccgtcatctcctgtttaatgtccccactgcctcccctcacataaacaagcctcatgacgcctttgggactctgccgaatagatctgatggtcaacttgatacaacccagaacccccacagaggagagtcttcgtgggaagttgtttggatgaagttgtcttatgggaacatcttgggggaaggaagtgtgctggcaagtgatgtaggaaaaccccacctactcttcgcagcactagtccgtggcaagagtcccgcaaatgctcaaagacatgtctcccctacagttattctggcccgtggcagaacagagtattctagggattccacaacaggccatgcagcctgtcacagcactgtcacagcactgtcagagcggtggttcttatgggccatgaccgctttgaggtcgaccaactctttgacagggatcaccaaagaccatcagagaaggatttacgttatgattcatggcaaaaatacagttatgaactagcaaggaaagtaatggtgtggttgggggtcatcccggcatgaggaactgtattaaagggtcacagcattaggaagggtgaggactgctgtgttacaaagaggctacagggtgcgtggatctgtacacagagtggcactggccatgtgggttgtcctactcaaagtgatgagagatatggtatcctctgtctgagagggatgaggagatgttttgagcttagaagtactgtcccataaggggtttggtcctcagagtctgcccagcatccacaccctccagttgacttcatattgaattctgattaccaattgcttatattgtaaggatattgttcctgtgtccctctgctgaccctgcatctggagtgcactcagtgtttaaggggagagcaagtgagtactctctagtcacctccagccacccaccggagcatagagggcattagggatatcatttccctggtctcagagctgagaaccctgagcagctgggacctcatttgagcccatgaagacccagcgcatactggcctagttatgtccctggactgcatccagactgcaacggcagggctgctcgtctgccggcacagttgttgcttgctccatctacctctctgtgccttctgtttgtgttttcaagaaaagcattccttaaaatagatgttcttcctgatggcgggagagctggtgtggggcggccatgccacctccccgactgctttcactggagcctgttcaagtcctgggagtttgctgtgagactgtgttgacatgggggcctagtttgttgtcacaaataggatgtctccaggatgcaccttcctctgtttcagtgggtgacaaatttcaaccctaccaaccaaagttgagaggccaggagccagcagtatgggagccacttaagtcgccgtgtgtgtgtgtgtgtgtgtgtgtgtgtgtgtgtgtgtctgtctgtctgtctgtctgtctgtctgcctgcctgcctgcctgtgtctgtacatgtcagcacagtgttctcccacttcacacccatgtgtgtgtgtgtgtgtgtgtgtgtgtgtctgtgtctgtctgtctgtctgtgtctgtacatgtcagcacagtgttctcccacttcacacccgtgtgtgtgtgtgtgtgtgtgtgtgtgtctgtctgtctgcctgcctgcctgtgtctgtacatgtcagcacagtgttctcccactttacacccgtgtgtgtgtgtgtgtgtgtgtgtgtgtctgtctgtctgtctgtctgtctgtctgtctgcctgtgtctgtacatgtcagcacagtgttctcccacttcacacccgtgtgtgtgtgtgtgtgtgtgtgtgtgtgtgtgtgtgtgtgtgtgtctgtctgtctgtctgtctgcctgcctgtgtctgtacatgtcagcacagtgttctcccactttacacccatgtgtgtgtgtgtgtgtgtgtgtgtgtgttctcacacatataaagtgaattggaataggagcacagggattcaggaatttcactgtggcactttttctttgattttagtggagcaccatatgaccatcactctatgaagttaacactttaaagcatttctccttaaagccagaggccccaggtgctgaaatgtgggcctatgggatatgggcagcggtgaaggagtcccttgcaacatggagtatggggagaaataagagcgaccatacagcatgcagtggaggtgcaatgggggctagtgcaggatggcatggttggggcacagtggggctcatgcagtatggggtatggacagaggtgaaggcaaccttgtgtagaggagccctagggggaggggcagtagggtttgaagtgcagggggcttctatagtgcattcttggaggtggtataatagaacttgtgcagtgtggactactatggaggcccgtaacaggttcatgggatgcaggtacagtgagtttcatgcagtgcgggctataccaacttttaaataagtcctggagatccaagctcacttcccaggcttgcaatagcaagcactttacctgctaaaccatcccttcagctcctataagctcatgttaatcccagctcagtccatgtgtacacattacttacacatgtaatggaaaactgttcttcaaaacactgtattacctgccaggcactggtactttcatttatttaccattttccaatgagggctgcagtgtagctcagagttggagacttgcattgcatgcatgaggtcttggatttgattcccagcaccaggagggggaattttaaatcttaccaatgactaccggcatatgtagctatgagggtgtataggattatttctaataattgctgatccttgtaatatgtcttgccttagagactcaatgtggtccctgggaacccacccttcctggttcccaattactcttattccccagtagtcccctgccccactcctcagttttgtgggccaggttcacacagactcagttctcaaggaacatgcccactccaaagtctacaccgtctcctggtctgtgggtcagagcatcccttgcaggtgggtgctttagtgactttggatttcaccctgcagagaaactgagtctcacatattttaaagacaaataagcccgtgttcactgcaaggttgccatctctaaccagtgtgtgcaggacactggggtctccagtagggtttcactggagctgtggttataaacctggcctgaccgtgatggcatccaaaacccatggaagcatacctacatatgtgcataacgtaacataaatacagcgcacatttgctttaaaggctcataatgcgcatcctttaaaggggcaaagtggtataggagacagggcgggaagatctcaagttggaggctagcctggggtatataaatttgcctggctcaaaaaggcaaaagaggcagggaataagctgaatgaatgaatgaatgaatgaatgagggaggagaggtggtcctgaattgacttcatcannnnnnnnnnnnnnnnnnnngatgttctttactggcttgcctcacctggcttgctcagcctgctctcttatagaacccaagactaccagcccagagatggtcccacccacaagaggcctttcccccttgatcactaattgagaaaatgccttacagttggatctcatggaggcatttcctcaactgaagctcctttctctatgataactccagctgtgtcaagttgacacaaaactagccagtacagcatccaaaacccatgggaagcatacctacatatgtgcataacgtaacataaatacagcgcacatttgctttaaaggctcataatgcgcatcctttaaaggggcaaagtggtataggagacagggcgggaagatctcaagttggaggctagcctggggtatataaatttgcctggctcaaaaaggcaaaagaggcagggaataagctgaatgaatgaatgaatgaatgaatgagggaggagaggtggtcctgaattgacttcatcagtgtttaatgagtgagcactaaggtctctatatttattcacttttccaatggtgtaattaaaactttcttttacctggcatgcctgtcttagaggctccagtgaacattctcactgtggaaaagagcataagtaattttgttactcacctgcatgtcttcaccctgggggtggggggtgggggaatgagtaatatttgttgaaatggataccattactacctctacagatagtcgcaagaaacaccaggtttgcgtgagtggcagtttgggttttgtagcttattgtagtcagcatgtttgatggaagtggttttgtgttgcagattactaaaaaatgactaacctttttatatgatggctttaagaggtcactctgtggcagtgacggccacagactgtctttgtcggcgtctagtcaggagcctctacatgtcatccatccctgatttctgtctgtcacaaacgcgtgacagaagtgcctttgcgtgctgtacacctctaaaatcaaggcctccaggggccttactcacctcttcctgcttcttctgtgacatcttgtgttggggtgacagactggcctgactgaggctctggattagtctccaacacttaaactaatcaatcaatcaatcaatcaatcaatcatcatcatcactcagctgccagaactctccttggtttgggaatgttttgagacctgaatttctcatacaaacacatcttcattgacagatgaaatactggtttaaagtccatttattctgaccatacactttctcacacttgatctctgttttatttcaaagcttgttttccacttccaactctcctggtgtaaatcagtaaaatcctccagtttccttccttgatgaagcatctttatctttgggtgtttgagaaacattgttgccatgccaggaggaaacctgaccacagggtagcagattcccccagcatggcccgccttggagaattcagtaaacaaattgataatgaggtagcatgaaatggggcatcaacagaaaccccaaaagtcattccaaatcatatcaccataacagtcccacaactgggatgcatcatcagaagagaagcatccaaagagttggtatgcacttgtcttgctctccagcacttactcagatgcacagagtgtaggttggggcgggctcggagaccactgcccaggcaggaactccatcatctggctggtcatacagcactcgggtgcaagtgcctgcttctgctgcttgctacctaagcacaaaacagcctgtgttggacgcacatctttgcaatgtttgctgccattgctgcctgggcttggctagagctgagctcatgtaggtagtttgaaactaatgtctttccagcaaaacatcaggagcacataaagatggatcctgaatttttgctaaactttattcaagctcacaattcatgagttgtctcttagatacccctgtcccctgatgagtgtgcactgtgtccttcaagtatcagtagttgggagagaggaagccacaaatggtactactgctcttctcacgtgcgcaattatggatgatagtcaacagatctattttgtttgcttggttgttgtttgttaactgatatttatacagctctggaatgtataatgtcaaccaagtagaggacagatgagcctgctccagagttccttatacgactgtcgttggtgtgcgtcagggtggctgtagatgcgactgtaagctaggcagaagtactgacatcatttttcaggccttctgctgactgctgtttcccagtgcagagtgtgtcagccagcaactcccttctagccttttgctggacaaggatcccgtgttggattgtagctgagaaaatgcaagaacccccaaattcctcaaaagtatttgtagctggggtgctggctcagtcggtagcatgtttgtcacgtgaatgaggacctgagttcaagccccagagccaatgtatctgtcgatcctgtaatcccagcactgggtaatcagggacaggtggatctgtaggactttgtggccggccagcctagcatgcatggtgagctctgtggcaatgagagaccctgtctcaaagaacgggacatcccgaggaatgacacctccagtatctctgtcccaagctgagcatgtgcgtgcacacaaatgcagagcgcgcatgcatacgcggatctgcagacattgaggtgactcgttctccaggcacatctgtccaatgctgagtttccattatctgtcatgcatcctttggaggagagacaagctggctctccagttaatcacatctttaatctatctagaaggaaagacccaaacttggaatacattatttctataaaccttgttcgtgtttacctgccgttctactgaatgggaaaagataaagtgatatctgtaaacgggaatatttcttagtaaaccaacccagtgcagataagggtttctaggtctccctgttttgttttggaggttttatttttgttttgttttgttttgttttgtttttttcagatagctgtgggaagggtttgatcctatgcaaagaattttccagcgttcatatgttttcatgaagtagaaataactgtgcgctagaggggggaggcggttgttttgatctgatgtgtgccccctgatttgtggtcctctgaacaccagaggccaagacaggtgctctaactgcaggacgtgtatgcgcctgctgttggacacactagtctggagccctgagctctgacttcctgggtgactcccaaagcctaagacaagaccagtgagtcccataaccaactccacactggtcccatttaagacatgaagaagcatgctatatggtaggtcaagagagcaaggaacacagcatatccaaaattacagacttcctccccagacatggattctccagtagcatacttactggatagaagggggggggggagaataacacttctttccctttttacaacctgcagtttataagatgtattagcagctaagccatgcttcttcaggctctgagctctcgggaagctcttgagtttatggcaggataagtacgtgttgaaatgttccaaacatttctgtcctgccttctttttttaatctgtgtccaactctgcccaaaccctaaatggccttatatgttcctcttccctgactggccacacgctcccagctctacaagaggattccttacccttcttttgggggggtaggcacagagtatcagtcacttaaaggccagatgttggagctgcacttccagggctgctggtgacagcctggagcctcatcctggccgtctgcctccatcccgcccccttcctgctgcacccataccaggttctgcatcactctcttctctgctgtaggacagttttacagaacttcgggccctcgggtacagatggcaacattaacactttgctttcttcttcacagacacgagacgacttcctgggccaggtggacgtgcctcttagtcaccttccggtaaggacggttcccgactctgggttgcatgctgggattgggggcttcagggctttacagcgcgtgtctgtagagtatgacagacatgacaaaggggctgagacagggagtgtgtgctcgggccatggctcttgctagacagcgtccctctggaggggtcggatagaggtcaatttagctgtcaaagtctccatctgagtcacatggctgctcttgttagcatctctggctcacctcccttatttctctactcctccacctttagccattgccccttatggaatagctatggtctcctgtccaggttcatcttaagggcttggtttttgtttccgtgtagtctttggtatagcttggtggtctttcccctttggttaaaatcgttacacctgtacaggctgccgcttcccagcctgtatgtttatgactttccaattggttggagatggaaaagaagattctgttggttgtaagtgtgcctgttcactgacggtgccaccctcacctcagaatgttccaggttagcctctgcgtctccgcctcccttcctccctgctcagtgagaagacggagggggctgtggactgtgactgcagtttgggggagtcacctgcaccctgtgtcagtgtaaatagatggctcatataccagctgccattcctaagactgttccgtcccccccccacacacacacaccctgccacctctcctccccacccacccctcaccccccaagcagctcaaagtgtcataagtaacagctatgagaggagaatcaaatacttctgccttacaagggcatcgtgtgtttcaacccttgtgtgagcacgtagcataaatagtctataaactaaagtgactgggaggagccagtacaaacctggtgtgtggaaaccggggctgtttccgatggcgagtgctaggaaagggaggctctgcagatgtaccatgaaggaatgcagtggcaagccatgatgtcactctctcttgagatgtcagctaaggaagagtcttcaagaagcaagcacattaagatacctgtgtttctatgtacagagctgaaccccaggtaccctatggttgtactgcgtaatgcttctatgagaaccacatccgaaacctagaattttttttacacaagggagggggcatgagtacatacccacagatgcagggacaaggtgtccagctcccttggagctcctgtgagccaccccatgtgggtgctgagatatggactttagatatggacgtcctgatagcgcaggaagcaccctgaaccactgagctatctctccagccccaaacaggatgattcttttcaggcctcactgagcatctctgagcgtctcaaaagctgcacagaaaactgtcttagttagggttactgtggctgtgctgaaacaccatgaccaaagcaacttggggaggaaagggtttattcggcttatgcctccacatcacagttcatcatcagaggaagtcaggacaggaattcaagcagggcaggaacctagagccacaaaagggtgctgcttactggcagctcctcctggcttgctcagcctgctttcttacagaaaccaggaccaccagctcagggatggctccacccacagtggtctgggccctcccccccatcaattgctatctaagaaaatggtcccagaggcttgtctccagcttgatctcatggaggcattttctcaattgaagctccctcttctctgataattccaaaaggcttcaggcattcctgactctgtgggcttccctgttgtgttcttcaggttaaaactggaaagtcatgctttgagacaacgttaatcagttggccatttttcatgtggcggtccccagacactctcttccctacagtaagaaccatgcatttgtcaagggaagatattgactcatagtctttaggagtcataagtgaggagctggagagatggcttagcagtttagagcatttgctgtgttcttccagacaacctgagttcagaatgcatcacccacgtccaatggctcactgacacctcaagtccaactccaagggtcctgagatcttctgggctctgcaggcactcgcacatagcacagatacgtctacatgcacagacacaggcacagacacatcaacatgtgcagacacagatacatgcacatgcatagacacagacacatgcacagacacatgcatagacacagacacatgtacagacacatgcatagacagacacagacacatgtatagacacagagatacctggttttggtttttggttttttgcttgtttgtttgtttgttttacatccttaaaagttaaaaagaaatgctgagagtggaggcacagtctgtaatcccagcacttgagaggcagaggcaggtcatctcttcaagttcgaagccaggcaggactctgacacccccacctaaaaaaacaaaaacaaaaacaaaaaacaaaaagagccataagtgaaagttccaccgccttcctccaggatgccctcttttgtgtgatttaggggtggctggtataaaaggcgtcatgcttccagtgaatagaggtgtgttctttacagaccaattcagtacagggaataactgggctttgggattctgagtggtaacccgggtaaactttcaaagaagtcagtgccgtcaaggcccaacatgagaatagaaaccagctcattaagaagatcactgtgtgagcaaaatatattccatgaatatatgaatatatgaaaagggcacagtggaagtcattatttcatataattaacatatactgagatttttatttttttagttttaagatcccacagaataaacaggacattcttctggttatggaaaggcccagagagaagcctaagttatagcaccatagcccaataaagcagtggttctcaacttcctgcactgcgaaccccccacccataacattatttcccgtgctatctcacaactgtcattttgctactgttatgaattataatgcaaatatctgtgttttcgatggactcgggccacccatgtgagctacctccaaggatatggacttcagtagaaagaagaaggggggaggtgaaggtagatcccttgtgctccgtgtggtagtagaagcagttaattctgcatgtacttggccatgagaccctggatttgaagctattacatgtatatttggcagtgtgtttaagacacttgtgggaaaattgcaccagggttcgttctgtgtgctaaggcaagcttagaatgtgttgttcgtgttcactctatttggtggcgtttcatcttgacagctacatagccattgctattgaaaaggtatcagctcaggacccccaagataagttctcagcacaaagacgatttattggcctcagagggacagaggacagggataagggataaagacaggagatagaggaaaagggagaaaggtgggacggggaaaagggagcaagggagatggggaagggtatttgcaatgaggggaacaggaccaaggactgcctctggataaggaagagacaaacatggcacataggaaaaatggcagtttataaaggtacaagggtccccccatgtcaggatgaggtgtttaattttaattggacatgttaattagggtagccaaagggggctttcaattgctggacttgaatgttttgatagctgggccttggtggtcatccccaggaggaggaagtcaacaaacttgggaatagaccctggtggctagctttaggtatgtaatctaacagattttagcaaggcagggggagaaggggaggaagaagggcaaggcctgccagagccatgctcaccatgcgcaagctggctagagtcccttccactgtggttagactctatgtagcctacagatgcaacagttgtcagaagcatccccttttaggtaagagaagataagaagatgaaaaatcttttagtcgacctaatggggctaagagatggctcggtggttcagagtatttgctgttcttatgaaggaacttatgttcccagcacccacatcaagtgcctcacaacagcctacaatgctgacttgagagactacaagcccctcttctggcctcggtgcacacccatgtgcacatacaggcagaaatgtttacacaatggagaagatccatggagatctggagtgtggggacagtggccctggcagccacccctcctggcctttttaaggactaaggagcctgactaagtatatggctattaattgacaatctagctgcattagcggctggagaattcattccctgaatgaatatttactggtaggagggattctggtcttggtaagtgcgtcagcaaagccaattctctcttgtggagctcagtgctggttttatggcagccacataccagtgtttgaaatgccaccagtgtggtgacagaacccacttacaagtatttgttattttcattaaggtttaaatgtaagccactttggcaagcggctattaataccagatgacactttcaaaaattagaccagaattccctcctttgggtccaacgtggttctcatttgctttttccctagatccatactccgctaccagggcatccgtgggctagggatcctaaaacccattggaaagccttgtcagtttctttcttcccctcttgctcacaccatttctctgtaattccgcacataattataccaaggtatttaatttcaattatgataaaagccttcagaattaagatcatagaaataaaaataaattggttttttttccaaatccaaattgacggactacttaattacctgttcctccatgttaacatatatatatatatatatatatatatatatatatatatatatattcagcttttaaaacactattattatgctctctttatttttcattgtgcttggtgctacatgcttctgccatggcacttaaatggaggtcggaggataacccagaagaacagcctctctctctacatattggccatggggttgatctgaggcgatcaggcttggtagcatgtgcctccacccactgcgccatcttgcacatcctattaagatatctgatgtacttggagtggtgtagtccctcctatactttactgctctctccttttccctcctgtgagttagcccctgttttcctcctagacaccacagtgagagaaaatatgcagtgtttgcctgaggtttgattcaatagacttcaaaccaaattaatcagaaacaataaaagtgatttcatgctgattaagtatattccttaggactgtatttcaaactagtgatgagctgctgtcttgttaattaggatagtacatctttattctttaaggaagcgttgtctcaggcttctttctgatgcccagcgtggcagaaagctctttggaaatcagggatttgatggccagggggaaggagaagtgaccttggtgtagatggctgtgaacttgctttaaataacttgaatgccccattttgtgtacttaatgtgtgtggttttgagagagagatactatagacctaccagctgaagcccctttcctcaccgacagccagtcacagctgttcctagcagataccggcacttgcaatatcaaactttgcctttagagtctcaggttcgctttgctgagcattttcctgtgtccatttgccacataagttccctgacccagagaaacccctcaccctcactcccacccccctgcccacagggtaatttagaggaccagtgtatctcctctgctgatgtacaagctcggagttacaaacttcagcttcgtggaacccacatctctgccacagtccattgccaatacctgagcacaaggattaattaagcagtgtagtgggccaggtggctgttatgtgtaagaccaaattggcagcctgccgggaggaaagtgcatgcacgctgggagccaagaggtgggcagaggagatggagacaaagctgctttgcgtggtgggtggtcactgcctgctagcccaaagcaggcgagggaggcagtgacagtagcaatccaatcacctcctttgatcatggattcctccaccctttgtactcaaaacaaagtaattttagaatcctgattcactttctgtcctggctgtagtcgcacttcccaggtttcagttgtgtagggacaaggaacggacgggaactgtggtttgagctgtgggggcagctgggacatctgcttccttctctccaattcctgactgtttatcttcagtatttattttcccctttattgccctttgaggaaaagactgaggcagagcaaatgtggggagtgaacatttatgtaggacagagagctaaaggaaacagccagagctctaagacattgccaaaggaccggctttaaaagatgaaaatctgcctgtcagatgtggtcaccttccatctgaagatgggggaattctctaaggttcctttctgggcccctgctttttcctacacgaggagagtgccctcagcggcaaggccaggttgcatcaaagcagttccagtgttccctgagcagaggctctgaggccttggtgacacacttgttacctaggagatgcaggctggcagcaggacggaggcctgcagaggagatgagaggctgtaaatgagaacagtcctttcgcctaccagctgctcacaggcacagccctgccagtgggcttcctgctgtcctcacagggccacaggaacagccttggctgtggccacgtatgattgctggtcctttgaaacgtctcttttcagacccgtttgctacatgccgtccatgattgaaactgggcatagtgtatcttccaccttctgattaggggtaaaaataacttgaaggcatccctgataacaggatgaagttctgacaggtgttctcccgttgcaccctggaaccttctcccgcctcttcccttctatgcctccctgacgcccccacagctcttaatgttctcatggctgccagttccggattctctggatccttgggcagtcattgcactgggtagagagacgctgttatggaaatgtaaatgtctccatctcagacacggttgtatccgtgcagcatgggctgactgctttcctagcgtggagcatgttcaggagagtggaccctaaggcagtctaggtggtagacgttcttatgttcatagccgcgggcagggtaacgatgctttctcgggtgtgcccatctcttcctgatctcttcttcaataccatctcttcctgagggcattttctaggtgaggaagcctgggtccagaggagggtgatttatcctagcaggcgacattgctgggcctgctactgattcttcagtactgaggtgtgcctacaccatggccaacagagtcaggaggagcctgaggctggggagtggccagtgggttttttaaggctgggcctttggcaactttctcctacatttgccttccagatggtttattttcaccacctatcatagagacaaggattctgcaaaaatagccattccctttaagacaacagcactgtccacaaaagtgcccctccctcccccgggtcccatagtgcagcatgcttcaagtcaactctctgcatctttctctgttgtggtctactttttgaggaagcgggggcgggggaaggaggcacttacttaaagatgttagggagagggaaactcaacaatgtctgtggaagaaaggaaactctagtcaagtgtgagtctcttctccagtctggaattcaccactgccttctctttggggaacactgcctttaaggtgaaaggttagtgttagagcaactgttctcaaccttcccaatgctgcaaccctttagtacattttctcacgtggtggtgacccccccccaaccataaaattagttttgttgctacttcataactgtaattttgctactgttacaaattgttatttacttatggtgacctctatggaggggaatgggggtagaggttaaatgacccccagggtaagaaatgctgggttagaggattttccacaaagagtattttgcacctgccttttgttgcgtggcattcattgagtctgcagcacctcaggtggagctggtccacgatgacagtggccaggactgtgcctggcaccttgtgtgggctgtgtgtagagcaccgtcttatctgattagtttaatcctcacaattcaggaagccctcgttgctacagacaaggacaccagagcccacagacagacagaaggaccacccagccctataaagtagtgaagacagaacatagacttggggtctgcttcttgctctatgagttttcttgctcgatatgtgaacagaagagtgttcagagccctctagtactcctcagctcctcaccgatgcccaccaacagccctgcaggctgttagtcttttccctctatcgttgaatttgttctctatccaaggctaggtgctgtggcagcccctcccgcatccctacaaccctcaggccaggcactccgatgccaccagtcttttccttgatgttgactaaaattactaaaaaccaacaattgtcggcattggtattctttctcaatagtttattattattattaatttgtgtatgtgtatatggacatgtgcatgcagaggtgaaagaacaagcttttagagttggttcttcactcccatcaagtgcattcctgagatttaaggtcttcaggcttggcagcaagcacccttgttgaaccatgtcactggccccaataataacatttcctgattaccaaggtttacatggtaagtaatagctattagaaattttatatagaaaataatcctcagatgtctaagagaatataataattgagtttttaagtgaaagttaatttttagggttcagtttttatagatcaaatgggtttatcaactatctaagcgcgtacctgctttcttttctccagccatcagtggtgagaaagttcaagttctgagctcattgcttcacttcctagaagctcaggagaaccacccggagctgactgatgtcaggcaggaggatccgtcagttcacgggcttcctgtcagggttagaatgacctatctgttcatgagatggctaaggcttcgagcatgaaccattgtcagggagatcgtcacagtggggtgaagatataaaacctagtcacatgggcgcaggaaggaattttcatatcactggggtaagaacagggcaaagtttgctgatagctcagaaggttgaagtgaaaactaaagtccccgagttcagtccccagagcccacatgaaaacagcgtcttccagagcccacaggactgacacaggcaggaactcacagagacagtgtgcataaagctgcacaagttcggggagggagggggggtggaatccccagcatggagaaggggacgtagacggagccctgtctctctccaagaagctgcatgcagttgatgccttctgggaaagagaaaaccaactttctccaatggagcaacgttgagtacatcaactgcactccagggcaggccccttgctgggaggagctagccaacacaaaacagatcccctgtttgtgtatgtgtgtgcgcgagttttggttcggtttggtttaatttgttatatttttatctttggggtttgttttgattttaggggtttcttaagagaggcagaatttgaagttgggtgtgtagggacatagtctctaggaggacttagttgggggcaggaaaggatatgatcaaaatatattgtttgagaaaacatataaagccaataaatgaaaaggcattatggtgtgtacatatgaatataatcgtatgccttacaattctagcagtgagggccgggcagtggtggctcatgcctttaatcccagcacttgggaggcagaggcaggcagatttctgagttcgaggccagcctgatctacaggacagccatggctatacagagaaaccctgtcttgaaaagcaaaaaaacaaaaaacaaacaattctagcaatgaggaagcaggcacaggaagataccctcacccccttaccctgggtttctgatcagccacactagcctaatcaatgagtatcagttcattgagagaagaaaaagaaggtgaccagtgcgtaaggttgtcctttggccagcgcacagtaggtacatgcacgccaggaaaagggggtgggggtggggaataagagaatccgaagccattaggaagaaaggatgtaaacagaattcaaatgtaaatacatactcttctcttcattctcttgacataatacatcattgtatgtggtttgcctctcttcctataaaagcaaatattttggattgcgtttaatttgacagatcaagtatttcaggtttgattacgtacaatgttttaaaaaataatggcacacatttcccccaatttcctgctttaatagccaaccaactttgcacattaaaatgaatcccaatgtcttaccaaatgagcacacatcccgtactattggtcgcttctctgttgctgtgataaacaagtgtggaccaaaagcaacttgggagggaaaggtttaatatggagggaagccagggcaggaactgagagcaggaactgaagcggagaccttggaggaagccaccaaactaagtttcttatctaagccaagaccacctgcccagggtggcacttcccacagtaggctggtacttcccacatcaaccattaattaaagaaatctcgggcagacctgccaaaaagctgatgtgatggggtgatccctcgctcagggtttccaatttccagatggttctagtttgtgtcaagttgacaagctaaggaacacagcccagtttcactcacagcttcatggaagagcccagtgggaggagtgagggctccctggatgctttgcatgggagatagtatcacctcaccttaggctgatgacttcatctttcaatgtgaggcatgcagctgcaccccaaggccaggccttgcattctgctaactctgtgtttaggtttcttcagtcccagggataatgaggcaccactgaccgatggttttccaaagttaatcgactctgggagattgaggccataccctgcagttagaaattacacttggctgtggtggctataattttgtcatttgtctctggctgggcttgactactagaacctgatgtagatagtgacatctagtggatcttaagtagacaagcttctgtgggcctggaaggtgtttaattaattggctaagtgcctgttgaggaaccagctctttttacccttggcatgtcctaaaaatatatccttcatattcctgatgagagtgtcaaaaatatgaaattgttatgaatgttgcttttctgctaattggtttttcttcccctagacagaagatccaaccatggagagaccctatacatttaaggattttctcctgcgacctagaaggtgaggcttggggtaggtgtaggggtgaggctggtgggtgggtataggggtgagttttgtgggtggttgtagggctgaggcttgctagtgggtataggtgtgagcattgtgggtaggtgtagggaaaaagggttgtggatggctgtaaggttgagttttgtgaatggttatgggggtgaggattgtggctaggtgtaggggtgaggcttgtggctaggtgtaggggtgagtgtttgtagtgctgctttctctgaggacagtttcagcaaacaccttaaaggatggaagcaagccatatcctttacaactggttctcttcctgtatgcagtcataaatctcgagtcaaggggtttttgaggttgaaaatggcctacatgccgaaaaacggaggtcaggatgaagaaaacagcgagcagagggatgacatggaggtaagagagacagctgcaggccctgggctcttcctggctgcccagcttacctgaatgtcgttctgagactctgtcatcggaggaagtggatgtgtgtaaacttaaatatgaattcacgtccatagaccctgagtttgcctttggaagtcctccagtatgtgactgttgcagccaaagtgaaattcccattttcctgtcacaacaccaataacagggcaggcagctcttcacacggtccttttagttatttgtccggctgctgttacaaaatacccctccaaagccactcaagggaagcacagctcacgtttcgagccaacagagtccagcgtggtggggagggtgtggaagtcagatcgtgaggcagctggccagactatgtcagttaggaggcagaaagtggacaggaacaggattcagctgtgaatagacaaggcccaccctcggtgactccagcaagactccaccttctaaaggttccctaaccttcccaagcagcagcagtggaatgccgggtgttcaaacacatgagcctaaggagggcatttcacagccgcataagggcatcttccatggcaaccccactgccagaaaccccgtgcccattattgctttggattctcagttcttttttaggttccttttagcacttgacattgctctagagtgaatagggttatttagaaactctatccctatctctgatccatttagtccacaattaacagcgcataatgcagagtcctccttgggaaatgccagtttgcagttagctatccaaaagaatgttctctgcacccttcctgacatagtgggcttttcactttctggtcacgtgtctgtacctaccgtgggttccattgaactatctccgcatatgctgtagacagtgctgtttctgttagctcatttctcatattgttctgaaagcccccatagaagaagacctccctggctgttttcacatctgtttgcagctgttccacacgggggatacttgaatgatgcggggtggacaggttggccaaaccccctgcaaccaagaggccacctttccgggcagtgtttcactgtaggcctctacagctgtcgccaagtaacagggactgaagtgggtggtagaccaaagtagaggttgagatttcccaagcaaagcaacggattggtgtgtgaaatccaaggaattgtttactctcttcttgtctcccaagtgcagtaaccagtgattcggttgattttccgctggctttaccagggggatgttagggaagcaatacttaatgctgaagatatgtgtcggaacagtgtaactgatcctggcaccgtgcagtctctttgtgcagtgcctaagcaactgtggtagtttctagactcacaattgtaacacagaagtggggaatgacacagtcatctcctctcctaccagccccaggccatccttcttggagaccaatagccttttccctacacctatagcctagaccatgctttctcttcaaacacacatgcatacttcatggtggtgttgaaaggatgaaagccatagcagctctggtatgtcccatggcattggctttgtgcaaccctacctagaggtcattgagtcactgtaactaatggttgtataaaaattatcatgtgacttaagcaactaaacagggccggcgaagtggtacagtttgttagtgcaccttctgtcaaaactgattcgatctgtaaaatccacgtggtggaaggaaagaaccgaatcatgcaagttgtcctctgacctctacacgtgtgctgtgcatgcacacgtgggcttgcttgtcagcacacatactcaaataaattaatggtttttaaaatgcaaagaaggtaaatggagtatccagatgtggtgcagagatcttagaagctggcatggttaactggagcattgctcacatgagttttggaaccctgaattggtttctctcctggagaggaactctagctcagtgtgacacaggaaactgtcataagcctcagagtaagggagaggatgccacactgggattgtcttctcccgtgatctgaagcccagactcaggactccggttgactttactccacagcatggatgggaagtggttgactccaacgactcagcttcccagcaccaggaggagctcccccctcctcccctgccgccaggatgggaagagaaagtggacaatttaggccgaacttactatgtcaaccacaacaacaggagtactcagtggcaccgacccagcttgatgtgagtaccacagatggcagggatgctgtgcctcaccctgcacagcaatgggtggcagttccaggacaagtttgggagaaggagggagggagggagggagggagggagggagagagagagacagaggcacagagagagagacagagaagaggctgttgccttgtggcactatgattggagttattctgcgcctctcctaggattactgaggtgtgcgtttcctggattcttcattggcttgagtcaccttgcctccctcttcctctgctccctctcctgattgacccaggatggaaagccagaggcagactggcttgcttcaatgtctttaccttcttactctcttgcattacttgatgatgaaactcaccaaagcttcctttatgtttattttatttacttctcaaaaacatttgtgtatcgctgccttggcatatttagaaacgcacaggagatttacaaagtcaaaattagtaattactgtttatttccacatcctactagcttagagagagagagagcagggtggctgatgcctgttcccttagtaatttttgttctgatgatagcaaataaataaatcctagttaaacctcgattactgttttaaagaacgattttgaagtggctttttgttaaatcatagtaagcagcaaaacttaagtctctcaatgtgcagttagaggcagagccacactacccacgaggaaaggagtttccttggggattatgagctccagagaagccaaaacagcagaattaatattaacaagtagttattacgcatgatcatttctcagaatgcagccaaggcaggcgagtgggcttacgagtgatagtctaatctcttcaacccaaggcaaaaaaaaaagatctcccagtttctgctctttaggtaggtgatatccagagatgctagaggctgtcctcacaaatcctttatccttagaaggtttaaaggtattctctgtataattggggggagattcttggaactatgagctgttcttggccagtttgcactgcccagcatggccttagcttattgcttagacaggatgcacatagttttgttgggggtcttagatataagtgtttttgttgatactttaggtttatcactgtttgtccttctctgatattcactgcacttggaggtttgataagccatttttaagtatcgtaggtatttggagtagaagtgtctttggacctaccttgggcatggtctcatactgtcagcaaagcagctgcatccatctgaactaaacagcacaggagtacacccaaaggggctatgtggcaaattacgttgcagggtaatgttgcatggtggcccgcgccatgatctgagggaaaatgggtacagttgttactgaggtgattctgagacaacacttgccatgtatttaaagcacatcatctgtgaggctggctgacagtctcacaggtatgcacttaacccaaatctatcaagatgtcagttccgtaagtatggcttcttaggtgtgaagcagatctcaagagcaagggagcagtttgattggcaggagtcagtttccacagcctctgctttatcccctctgccgtttatggatttgaattatccctccttagcattgtctgacatgccaaggtcatttagagactttttatgtgtattctaattttacattttgtttaataataattgagcatttcttaaaaaggcaataaatgcatcatcatgaatacaatatagcatttttctaacagccgacagtgccattttttaatcatttttgtgctttcagaaacattattactatatatatgtgcttcttgattataatgattacatctataataatatcaattttctcaagatacttctatttagtatacacatttattctggttatatttaatgtagcaacatgttttgttaatgcaacaaatttatgtattgtacattcaaatataataaaatttatttaattcagattttagtaaataaagaattataatttacttgtggattaaataaaaactaactttcacagtacctcctgtagccctaaagttgatagtgcaaagatgtttgatagaaatagttgaatattcagactgttgtcctccgacactgtggcttgttgagtctagtggctatgcagaggcccagggggctctttatttgggatatgagtgagtttgaaagtactggaaactttaaatccttactttagaaagaatctatagctaggctgtctattaatagtatatctatcagttcaccggaactaaatttctcaaccattttggaacattaaccagcaactgaatttgcactcattagatgtggagtcagatcgagacgcgtttgcaagcgcctgggaaggacctttagatgtgtactccagacacgtagcagaaatttcccccaaaagaccgtcacctgtcatgtactgcaaaatagttttaacatacagtcaattcaatcatctttaaggataagttcttaactcggattctaacttaaaatctttagtcgacaatacaaatgagatgtgacagctccatgttcttattacaggcttgtttgggaagtcagcccctgctctgtactcggtattagaagcagggtgctggaaggtggttgcaatcttaagatgtgaggtttttgttaaaaggagacagaaagcagctaaaagtcaagtcacacaccacaggagatgtccccttgggaccacagcccttgaatttgtgccgttagtatccttcggtcaattactgatgacccagattagctgcttggtccctgctaggtaggcctagaagggacctgccgactgcctgtgtgagcttgcttgtcacttcctgccaaaggactggcttgtcacagactgaagggcctagatttctcttctcaaatactgaagcttcatctctgaacagccaaccctgtccccactgcctccacacctgtgggttcagctgaccatagaacataactatcggagacgtattaggcctgtactgaccctgagcagtagtctgtcttcgtcattccctagacagtgcaggataagttgtttgtggaagatttcctttgtgtgaagcattgtaagccatccagcggtgatttaaagtacaccagaatttgtgctgtgtgttctgttaaatcagccattctgttatagggatcgaacatgtaggatttgaagtctgggggatagggagggctctgcagccaatcccccgtggatgcaggaggatagctgtatatgtctgaaagatgctctaactcttgtacaatacactgaagctgttttggggggctagggtgagtgtcagtggggtctgtcctgaagatggaggaagacttctagtattggttgcttgttcctatcattgtttgacacagatgtcttagtcggtgcgtggaccacagtgagggttggactgtcagaggcatggctctgaataccccttctcttcttacatcccccccgccctcctttcagggatgtgtcctcggaatcagacaataacatcaggcagatcaaccaggaggctgcacaccgacgcttccgctctcggaggcacattagtgaagatttggagcctgaggcctctgaaggcggtggagaaggccctgaggtatgatgtccagagatgctgtcgaactaagtagctccatcttccaacgttccccagggtgattttgtaccttatttttttcccctctcggttaactgtgtattgcatgtgacgattgcagcctcatgactaactgatttcccacctgagtattagtgaacttagaaaacgcttgtgaaaccaacgtttgaccaaacccagtgactcgtagaaatatcaaggggagaacatgattctggtgtgaaggtcttatatgccaccccccccctgggcccccggggacctaaccaatctcatgacacaacactaaagttgtcattttgaggaatggagggagctcagtcacttgtctgggtctcatgggcaagtttctaatgagttgcttgacatcttgggagagattacccaaaaaatgtacaatctgagttgattggaatattgataactcttctctataaccagttagcaatgtgttactggaaaaaagagatgaagtaagcaacaagtcagaagtgatcttaacttgatgctgatgactggtccttggcttgacctcgtgttagaaaggtcattcacaaaaacctttcagtgaccagcattagaacagcaagctagtggtttcatagtagggccactgaacgttctgcagaactaagccattttaagaaagaaagaaagaaagaaagaaagaaagaaagaaagaaagaaagaaagaaagaaagaaaggaaggaaggaaggaaggaaggaaggaagaaaaaagaaagagagaaaggaaaactatatgagaattgcttgtaaattcttggggtgtttctaatccatttgtaacacaggctggcaaaaagctgccacggtggggtgggcgtgtatgttgacaggagtccatggcggggtgggcgtgtatgttgacaggagtccacgcgattgtggccactggacctgcctgccccctcacactatgttcacatctttatggactgctcacttcagaaatttgctcgctctgaagtttcctggcctgttcattggggcaaaggcccttgttgtccttgtgctgatcctgaagcgtttgtgtctcgtgctaagtaggggttaatcaagagtcttctactcccagtcagttctggccctccgaagagtttccctctttacctgaggcaattctatatgaaaattggccctggcaggttggggaaaacaaaaaagttgttcttttagaaagaagggggcgtgtcaccagccttttcttgtttgatggttatgaatgttgtgtgttttattagaaggtagacaggtaatttcccagatcctagcacttatcctagtgtctgattcctccatagccttgggagaccatttcagaggaaatgaacatggcaggagattctctcagcctggctctgcccccaccgcctgcctccccagtgtcccggaccagcccccaggagctgtcggaagaagtgagccgaaggttgcagatcactccggactccaacggggaacagttcagttctctgattgtaagtcatggtattgttagaaaagctggacaccggtggtcagtcctttgttgtagcttctgaggatgttcttctatgcagataataaccaaggccattggttcttgacctacaggtcatgacccatgtaggggtcaaactaccctttcacaggggccacatatcagaaatcccacctattggatatttacattatgattcataactgtagcaaaattatagttgtgtagtagcaacaaaataatttcatgttggggtcaccacagcatgaggaactgtgttaaagggcattgggaaagttgagcgctactggccaagagtgttctacttccagtcagttcaggctctccaaggaacttccgtctttacaagaaggaaatttagccctggcaggttaaaaatatatatatatatatattgctcttttagaaagaagtggcatgttaccagctttttcttgtttgtaaaaaattcaaaggaataagattctgtggattttgtaagttctagctttagccttgtaggatcttgttcctgtccaaagactcatgaaaacagtgtctctgccatgaggccatttcctggtgagaatccggagccccagagcctcccaaccagtcttgtaaactcccactctccacacctctaccttccatctcacaaacaaggagaacggatatttaagtgattgtccctggcaaagccctggcaaagcttgaccatgagatagaagaaaccccaaaaccgagcatatgaactcttaaggaaaaaaaaagtttgaaactgtgacccagacatcaagataacacttgacctgggtttctcggccctcagagaaatacttcctagagggttcagctcagtgagaaggaacaaggtcaatcacaaagaactttgcacgtaacactgcgcggcactgtggggggaagcccgccagtcattctcatgtacatacagaattaagaccacacgcacatgccatgtttctcaagaaattggacttaaagatgtactggtgagaatggtggttgtcactaggtgggagacggcatcctcacacgatagtcatggtgatgagcacacggatcgtaaaatgattggaggactccattgaacctaaaagccactacgtacaacaacattattagcccttcgattatggtgttctccttaaatgaagctattggcctctgctgcgtgagtgacagtgactgtgtgcttccacattaacgttctataaaagtctttcagaaagaggatcatcaccaggatggaaattcagtactaagcggatagagacgaggctgcatagatgagatatttgaattggtaccccaaaaaaagaaaaaagccctgttaccatggaaacagcatgagccacaaggccacatattttaaatgtattaaagaaaaaaattgcagaaattataggagccatataccatttatataaacctcgtgggaaagaaattcctagttttctatgtcgatatgaattggcatttgtcacgatgagagtagggagctctccaatgagagtagagtattgagtgcttccagaaaccaggcgcaacctgaagacccgagtgtgattgcatatatcccttggggaacttcctccagtcttgatgctcaaggctgctctgtattcaagagcagtgaggtgaatgctttcctcaggatgacccacactgcccagtgtgggaagacacaggtcacccctgacacctccacctagctttgcctgaccttaacttactgtttgttattatacaaagtcacgcatgttacaggctgtagcatggctaagcattcttctagctaggcggcttttttgcctgtgaccttctcgaatctttgttcagatccacaaggcaaacaagtagaaggaacattctgtgtggcacacaggattgtccttgggtgtgcctcgcttcttctccgctccacttctgttggaactggagtttcctccacttggaagctaaatacaacccctaaccctagcaggaaggatgggcagtgtctaagtgcgatggccacacagtttagctggtaaagagccaagtgtccctttttcttgccccccttttcctccattcttcacacttgagaatttgtccagagcttgtgtcccaggtagcattgacctcttgttactcttgagtgtcttggggacctgcctcctctcccttccagtagtcttggcctccttttacctataaatcctggttgccggaggacactaagagttgaaactgagctctggaagggctacggtcactgctgggaaacaggtggtgttcgattgcctcctgatgtcagagagcagggcatggaagtacgaatgggttctgagaacactcctgctaaccctgcctgtctttccattccctgcagcagagagagccctcgtcaaggcttcggtcctgcagtgttaccgacacggttgctgagcaagctcaccttccaccggtaacaaacactcatttccagtcctcagctggtttcctgttttggtttggtttggtttggtttggttcggtttgggtttttttgtttttggtttttggtttggttttgttttgttttgttggtttttgttttttggtttttttgttttgttttgttttttgttttggggggttggtttggggttttttttggggggttttttttgttttgttttgttttttttgttttttagctttgatttaaaatcttcagggctgctgagaaagagtttttcctgtgtcaatccattcaccacacgagcaggacatttgaactttgctgattaaatcgtgcaagggtctggactttccaacccagaatcctacctaccacctaagcttccaaaatgctaaaatcttactctggttttactgagtaaaccagtctgagtctactcagcagactgcatccagcctgcttatatgactgaataggtggtctgtccgttcagcagttacaactctgagtttcagggagctgaactcggtacactcactgacccctttgaacaggaagaactcttccagtgagacagcctgattttttttcccactacccgcggcttaaactctcagctccacaaagcaactgcgctaactctaaaggcagctgcacaggtgaaaaatggtgtgtcctttgcttttccctgcctagagctgtgataagtctgagcgcgcaggggcaggggatatccaatatatgctaacgtaaatatcaaattggagggcaggtgagcattgcctcgcaagaaataatttgcataaattggtttcttctttgggaggtgaaaatattctatggttttaaatgttcaatttaatacttgaccttggccttttgtttgtttgtttgtttgtttttatgggtttgtggggagacaggggtggggggaattaagacagaggcttggtctataagccagaccagcctggagctctaattatagactctaggctagccttaagcttgcagcagtctcctgcttttccctcctgaatgctgagatcgcaagcatgagctgtcacacccatttttttttattattattattactacagatcctctttcctgacctgattcattgtgtatgaacttgaagacaggcagcagaactaaaatttttgaaaccctcttcctcgcatacattttttttcccctgacttcaagggacatttttgttcaggtcttactatttttaaaagttacaaaatgaagtgatgtgtatgtaccagccaaaataataaattgggttgtggagtccattgtgtatggttggctgataacaagctgagatgggttcggtgccgtacagacctcccagagcagaaccgtagactgtgccgcgctgttggggatccttctcagcctgatgattctgtgattgtcctgcgaaattaatcactctccccttcaaaatcagggtcagctttgtttgccgcagagtccctttgcctggatctgtgattgtacctgtccccttgttcttaagatgctgtgctgcgctcatggacccccccccccccaccagtggcctctctgagatgcgcagatataagaatctgctaagctttggactgtggaagcacaaaacattagtcaccccgatcaaggatgtagtctgagcttctttggggtggcgtggtgctacagagaggtcactggggcgtgcccagcttcatttgaacaaggcggatagcggggataccaatctcacgccacctgtcacagcatctccacagcagtgatttctggttcactaagcaatggacgcctccctcaccccccaccctcaaaatacatgttactgatatacattatcatttaacagcccagcaccccaactaggcgagcccgttcgtcaactgtcacgggtggtgaggaatccacggtaatgaccccagttattgaacactaacggtggaagtctgtgggatggtttattattttgcttatgatgaatatgctccctctcattttcaaaatcaggtcagtttctttatggtagggagacacctgcactttttaacctaaacttctcattttggggttctttaaggtactaggtaaaatggagtcgtttttaaccctgtatcatttgaagtactgtatgattggaagtactgtcaagcttggtggactgttttggtcggtgtctgtactccggtgagctttcttttgctgtcgaatactcggttaagcgagagaagctataggagtcgttcaggactgtgcatgtgagtcgaggtgcgcaagaggctgtgcactcctctttcccgcaccacatttatagcagggaaccagattgtctgcatcgccatcctaacctgtaaccactctctgctaccggaagtctgattttccaagaatgcacaagtgtttgtatgattcccagggcagcaattaggatatttcaatgaaagtatttacaattgttattattttcttatttttgattgatagcattcatgcttgtgtataatttcgatctgactagttgttttgtcgtgtcctactgacccttgaagtcaggccacgctgtatttgctgatttgagcttacgtgactctcgggagaagtgtcttaattgtttcacctgtgccgagcaggcgtgctgaagctgcttattatttgtgaataactttaactacttacacaatagctgatttcctagaggaagtttagcactccgtgttacacaaaggacactcagatatgcaaccagagcagtgagcacggcactaggctgctaagccgctacagtcaagaaccggaggaccaggctccacctccagctgaagtcaaagaagtctgcaggcgttagttgcactcctatggttgtgctgacacagcctactctgagtagtagagccacaagcagaccattccactggatggtttgtctgccacccatagtatcctctgagtgtatcattccttgttatgtttaattgggtttgcaacctacttatagctgtggagtgttaatgatggctcatggtatcaaaagacagagcaaactgactgtggtaaatagtcacccaaaaggacaaagtcattcgtctgcaggagaacccatgtgcctctagggctgccctttccaagccttcctcccacctgtgttctcctccatccatgaatatggtcttttacttgctttggtcttttatttttgaagccctagcagtgatagtttctagatgctcctaccatgatataccatgctttcttcatacctagatagatttggaaggaccatgtccgtttctctcccgtcctctctattttccgttctgcctcccagagtgactttaccctttgacctcctttttgatgcatatgccaggcagaaacttcctataaagtatcccctcactccaatgccctcccaaacatacgtgtgccatgattatacatgcaggcgctgtttatttgggggggcggaggggggaaccagcatgatgttgcatacattatgctcagaaaactatttttaacttaggttagtttttctcagctatgttattaagcattcagcattcagcggtggaagtacaccacagtttatacacatttcccatgctgacgggcattcccacactgtctactatgtgtggtcaccgtccttctatgtagcgctcctcccaaaagtgctgatcctcgtctgaggagtcccgaccttttgatttatggcagaagcctgcacactatgtcactttattacaggctgcaccagggttctccctttcagatagaaagagcgagggagcaaaaccctttgatcttcactgaagagattctaaaaatatcctgagataccactgtggctgggtctgggtgagtcatggagcatctatgatgctcagtatcaaaggatagtcagactccctcagtctcgatataatctgttcttcattgtagtgagcggatcccagcctccataaggctggagtgagggcctatttggaatgaaaacgcccagcagtgtatatagtttcggatgaaaactcaaatgttatgttcagcgtatgtttggcttacctaacctgtttctcgagatgagctgatgcatcattcacataggtaataaaagtctaatcattggacccaagcctgggcctcttccaagagccgcctggagaagctgagtcttgtcgttgctggtcatgtgccctgggtggccgtgttttagtaatagccggaatcactggcacaagttgttctacatgcttgtcttgaaaggatgctgtcaggtcgtattttaataacagcttcttgcatagatgtgactaaatgaccagttgcctatttaattcattttagacacattcagaattctttctgctagcctcctttgtgtaactagtcatgttattggtagagctccggaggttgttgcagctgacagttcagttctgagactgtaacacatctaagcatttagggatgtcagaaagtatccattccaagaacagacgttgccattgtttgttaaagtctcaatgtttctagacctgtgtcttctgagaacctatcagatggcctgtccctaaaacatgactcatcaaaaaaaaaaaaaaggagaacagtaaaaagtgctatttaatattccatgtagtcaaagcaattgtgctcatttaagccacagtaagtcaaaacgtattgtctatttgcttagatgacagaacatcagactaggcttccagccagtccagattaaaaccctggaagggaggtagggctttgttgtgggtgtcttccatttaggctgtggaccacttggtctgtctttcatggtcataacagcttacatctctttgttggtgtttgtcttgctcctggattcaggatgctatgtggttcgttgctcttggaattccctgatcctttaggatgtctctgggaaaatgtcaaggagcatttttttagcaagaaggttcctcatatatactctctccctgcctgataaacatagcttagaaataaccaccgagtcagctgcttcccagttagttttccagttcatttttctggagtgtgctgttgagcgtggaaagcccatagaggggcctcttcagtcacagtccttggcaaatgcaatatgcatgttcttgcttcctctaattccgggtcacggggcactgaggactctgtggctgtgaccttcaccagagcagttcatagtaagcagggtagctagggaaggacagaaagaaggctcagtaagagaagagtcacatgatcagcctaattccaagaaagcagcaccggctgaggtacttaagagaactggtgggagaagaccccacaggggaaacagcccccagagcaacagggctgttcctcaacctcccagaagtcttgctggccctggtaggtactgtctttctgaacgcctcccctagatcgttgcttcccagtacaattcgtgattcagttccatggatgcaggcattcctaggctagtgctcgccctgggcatcccttttctgccagtcacgcagacatcctgtttactctagcacctgttcacacagactcacgctgcttcttacacaaggcaaaatctcagtaattcttcatttaaaaggatggaattcatactgggtgtggtggcacgtggcagcactggggaggcagaggcaggctttccatgagttcaacgcattcctggtttacatgtgagttctaggccagccgaggctacgtagcaaaatcctgtctcaaaaaaaaaaaaaaaaaaaaaaaaaaaaaaaggagggagagagagggggagggggagagggggagagagagagaaagggaaaaaagaagacagagaataaagaatttgcactatctatagctcaaactagacatcacagactatggcagggatataacctatgtcattacactggtataaacactgactctaatatgaggcttcataggaatccttcaccagggaacttggggacctcctgggctgagcagcaaagacactataaggaccctgcagattatgtctccgtacatgagtgaaagtcagaggagagactctgtgtcacattttgccctgaacgtttgtgtgcaccgggcctcagggagagctgtgcactgagcatctgtggaagccagctgtctaacagtgcctgcagcatgcattcctcttctgggcctaagtgttgggcggcttgagactctcttttgaactatgtgaactttagcaactggaccaggttatgagacattgtttttttctttactcatactttggtaatggttctgaatttaagacctcagaggctaagagatgattttgtaagaatgtagatgcctttttgtctcacaggagagtagacgctcttagaatccgtttgtttctgacttccagatagtctttgtgggttgtgggttttggtttggtttttctgtttgtttgtttttttgttggtttttgtttggtttgggttttttttttttttctgtacaaacagaattaacttgccttgcccagagaaatataatttctaggtggacgttactttattaaactggtcagggaaacaaattctagttgttaaataataataatttcttgcacaaacagccatcagtggcctatgtacataccacgccgggcctgccttcaggctgggaagaaagaaaggatgcaaagggacgcacatactatgtcaatcataacaatcgaaccacaacttggactcggccaatcatgcaggtaggaagatcaccacccaacccagactcaaggaccgtagcagccaaggtgtcacgaccagccgcctagcacggtgatcatgtcctcttatgaagggcctgcattgaaagcagccctcaccaaagatatgtgttattctcagtagaatatttgcctgaggaagactttggtccttggatatgtatatccaacgtgacgtaaaatatactttcagaaagtgagcctatgaccatggatggctccctctctctccctcccacaccctaagtctcttcttctccaaggctagtttctagttggccagtgacttagtttttgttctcttgaatatgtctcccaagtctttgctccctcccccccccattattagttttaattatttcctgtatgctttaaataggccagccatattatggctgtgtgagttgttgttgttggggttcatactcctcatcacacacagggagatcctcatacaaagagctaacttgtttttgcctccaaactagcttgcagaagacggtgcctccggatcagccacaaacagtaacaaccacctagtcgaaccccagatccgccggccccgtagcctcagctcgccaacagtaactttatctgccccactggaggtgagaagggccgcctcgtctaaccagggtcatctctgtcctgtggcttctcttcattctctcttctctcttctccctaaactggactctgttccagaggcagccccacactgagcagtcatgtgttggtggcaaaggctgctctgcgcaggctgcccaaatgctttggggtctcagtcagctaacattctggactctctcataatcttcattctcattcggctggcgccatgtgtggccggtggtgcgctctctgctgaacctgtgcggtccatgttgtgttgctccttcttgcctgtcacaccatcagatctcatcattcttccgagtagccatgcttctgttgggtttcataacatagcgatcactttgttcatattttctttgactgtagggtcttgtcttccattgtgtgggtacgtgtttctaatgtgcattttcatctctttcatcattgctgaacatctgcttgtacgctatccttgacatgctttagtgaccgccctgaacgtcataaacagcagacactcaaaagccagagaagacatgagtaaattaaagtgctctgacatagtgggagctggtgacagcacctccagactgtcgggaatgtgggataatgactgtcattccaggtggctgcctccattgatggaggtctccttccgggctctaaaaccaggcagtgtatttgttggactgtgggctctttgagagtaaggacttgtcttgctctgctctgaaatctctacccataaaatggtatttttgacaggcatgattggcaaagaattgtagctgcttatccttgatatcattgcttatctaaccaatagaaaggcctaaagttagggttggttagaaagtagatagagaagtaattgggggtttgggggagcctctccctcattggtctccgaggaagagctttctacagtaccagctgcattgtgacgtgtgtcggattggcccgtggtgaagagttctaacactcgttattgttccttagggtgccaaggattcacccatccgccgtgccgtgaaagataccctttccaatccacagtcccctcagccatcaccttacaactcccccaaaccacaacacaaagtcacacagagcttcctgccaccaggctgggagatgaggatagcccccaacggccgacccttcttcattgaccataacacaaagactacaacctgggtaaggctgctgcttttatttggctccgatttcttcactgtgagctccggttaattctcttcctttccgactcaatccttgcgttccttctagcggagttctatcaccagctctgaagcgagtgtcctgaggggctggtgggcacctcggatgctcagacacagctgggggtgctaccagtgtggcagtcctgcaaagctctggttttaagaatttgttccattttgagggtaagggcaaccttggccctgctagccttttgacttcattgtaacacttctcaggctagtagtcattgtattaggaatggtaacatttgaaactagtgttttccctgtctctttttgccctgcccacccttttctctctaatggtcatcccagataagcggtctgaatttctgtgctatattctctctcctttttttcatgaattaaaattgccttagtgacctggtgaagacttgactgttcttcccagtgaacattttgacctaactgatttttttttttcgccttgatgatctttatccactcacacgggtgaaagagcctgtgtgttgcacttgggagaaatgagttgaggccaaggtgaatgaccatcagatcatgtccctctgtcagatctttgtttcatcagcatactcagagctagcttcttcaaggcagcacagagctcttgctagaaatccacattcctccattatagtccctaactctgtacgtaagctgaatttcttctcttgtttctggttggttttgatgcagcaggttttcacttttctgactgtgtagagcaaagttggggcttcatgctgcccctccagcatcaaaactaacctcagttttccctggatgactcttcggtcttggatcagttgtgcccgtgcactactggttcctgtccctagctgtggtgactgcccagttgatggaccaggggtattgtgttaaggaaagggtttcgaccaaggtgaccttggctatcatttactctcagtctgtggtgtaatgttaattcaatcccttgagagtcagaccgtgctccctaaagtcctgtgggctgaggtgcagcatgtccccgcaaggacattcttggcagctagggacaggcctatgccttccactgcgggatgctcaacacccttggctcccaccgccgaatgctaatagctgcctgtgaccctcccaatatactgacaatcaggaatgcactcaaatttccagacaccccatggtgagaactgaaccaatctccaatctccggggggcccttccctgttttgcagagaaaggaatttacctgcctgccaagggccttcccatcaaggtctgatgacattcatttggtaaacctataactacttcagaggcatagaatgacagggaggttttgtttaactcacctttgagtcggaagatagtattacaggcctgtgggccaagagagctgctctttggcaagtagaaccatagagattggtttggggtcttttttttttttctgtcactgacacagaacctgggcagtccttctggtgttcccattttccatagctctgctggggttccaaacccttagccaaaaaaatcagagctccagagataggggataaatatcataaaagtcagaggattagtgaatggagccactgtggcttgccaacataagctatgattttagtaatatgaactagcttagtaatgaaatcccctaaccttttcacagcctttcacgccccaactgcagcgtaagtgcagctgggcaggattgattttaaatagcactcactttctttactgctggcaccggtgccaaatgaaacctgcttttaatcaccagttgtctctctttaccccagactctggccattgaccgattcgctcatttgaacacttactttattgaaacacttcattgcagctaccgttgaaaagttcttaagcagcaactggaattccctcaagttatacctcccttcttcagcaggcagatgtgctgacacagctgtgttatcccgacccaacaaaaacacggacagcataccgcattctcttagagaaaagcagattcggaactaactgcatgtctgtcttgacgaggggtgggagaagcaggaagagaaaagacgctttttgaattcaggcatgtttgcagatggcaaatatgaaactcagagagggcagtgtattcttcttggatttgagtgttgtaacgcacaagggacaaacaaccgataagacagtgaaaatcacacttcttccctcttcatcctgtactgttggttcttgaccttctctggaagcgtgaaaagacccaagccgccatcccctttagacctggagagtgagtcagttagaatcattctacagtgtgcagcctttattcacacaagggatgaaggctgtctaactggaattaaatatgaccacatttttaaaaaaattaataataatggatggctttagcctcaccaacagcaatgtatgctgggagtcactagagacccttcttcattcccccttcttaagggagcagctaaatgtgtatgtgtttgtatattgatgcctttcacaagacaaagcattggcctgtctttacaacagactttatgcattaagttaaattagagctacccaagttcacactaaccaaagcgactgtaacctagcgtgcctgctgagactaaaggaaaaaaagcacattaggatcttttgaccaatcagtattcctgtnnnnnnnnnnnnnnnnnnnnnnnnnnnnnnnnnnnnnnnnnnnnnnnnnnnnnnnnnnnnncatacacacacacacacacacacacacacacacacacacctacccagagggaatgtagacatggcaagtgtgtttcatctgcttgcttgcttgattgattgattgatattcttgtcattgaagatctcattagtattccaccttaccatttaagtgttagcagaccccagctgccatgtctgtcacttgtcctacctccttgggttgtccaagggacagtaccctcagtggttaccactacatagtcctcatatacggactacgggcagctgcagtcatttttttttctactgttactatgataaaatacgaatccttggcctgggcctgccatgctctgccatgaaagtgtggcttccatacaaagccattttagcagacctacaaagctggctccctccttcttcccctcccccggggcctggtacttttcattgatcttaggatctttctgtttttcttctccgcatcacccatctgtggcccacagagccaatagtcttgcacagttgacttcactccatggctgggctttctgtaaacctgacttggtcattggcttcctgggatttcaagggtccttggtagctgtggtatcacctctcatatctcagtgttcattttaagtcttccgaccagttagccagctccaagtggtatcctcattatcagcttcttggcctctctaaatcctaaatcctggcctagctctgtgtgctgcaatatgctacacggatgtagtgatacaaatgactacatctcaacctttggaaagatgcatttgcttcagggtcaacattcctcacaaagcaacactacgatgatttatgccttcaattaaaatctactctcgcttgtagagacagggctgcttgtacccttctctgttcttgctatttccaaaaacctctcacttggttatcatccagcgctcctggcttccactgttgatccgggaagttaatgaagcctttggtttagttggcagcagcgcagcctttctttgctttgatgagatggagctagtgtcaaacggctccatggcttgcttttacctgggttgatggtgttattgttccggttgactgggcatcgttctgcgttttatttgttttctaatcttttgagtttaaaaactttggattctttaagccccaattgtctctgtgtaaggggcaagtcccaactctggatcctctcctttgggcaagtgagtttgagaaactgagtctctgatactgtttttcttatttaaaggaacagagacaagggaggttgcaaggtcagatgcctaactacttttttttttttttttttttttttttgcaaaggagaaaacataaccaaagatgacagagtatatatttccttccttgatttttctctggcctcttaggagcatattttttaaggaaaaaatgcttacaaagtttatgttaagacagggacaggaacctaatcaccagcgcttgatcggtaatctcattcatgttgcctgctagcatacgtataacttataggatgaagcaggctatctctgcaatagcccatggactctctggtcagagagatgcagaaggaacctgtgaagcccaagtactaaggactgctgttcttaaagggtcacatttagagactatgaacactcacccctctctggaggacagtcacacttctcccaatctggttgcctttcccctttccctttctctgagtcttggggaaacagttaacctcccatcggaggcctgttcccctttcctgagatgtggtagccaggcttcctctaccaagcaggcaggtcgctgggatcccctcccaggtgcctgggagcatggaggaccggaaggtgccaatgactgcgcacggggttccctcttaactactatcatgtacatttttcctgcaggaagatccacggttgaaatttccagtacacatgcggtcaaaagcatctttaaaccccaatgacctgggccctcttcctgtgagtatactccagagacatgaaatggtccaggagtgtacgattatcctctcagtgttcctgggaagcctgcaccccctgccccaggctttctgggtccattggtcaatgttccttagaagggtgagacgccagggcagtttgaaaagtacattatagtacattatgagccagtgcttgtaaaagaaggcttctaattactagccagttcgtttttgatataggacatgtgcaaggggcgactattgcaggtggcaatttaagcagcgtgctgttcattttgtaacttagcaactcctgagctccagccaaactgcaaacaaagtcctaagaacaaaagccatggaaactgtggaaggaaaaggcacaaataatcacacaaagtttctctaaggtcacttaacctgtagatcttttttaaaaagcgttttcccctttgttgtgggctctttatgaacctgaggggagtgctttgatttttttttgttttgtttttgcagttttgttctcctttggaggcatgatataatttggtctatactgggtttgggatgaaacgtttactatctgccttcttcaacggctcacccttcattaaaaaaaaaatgctggagatgaggagacagggttgggttggggttggggttggtttggggttctagtactcatttagatgacccagaccagcctggaactcaaaatcccccttggtcttacttcccaggttctaggatagcagacatgcaccactacacccaaccctgagcaaactgtttttaaatggaagttgttattatttcccgaggataagaggagccttttgaaagtttaagaaaatctcttaggctgtgaagatggctcggtgtgaaagagtgcttggggcacgagcgttaggatccgagtttgaatttccagaacccacacggaaagctagacttggccacatgcacgcctgtagcccctggtgctatagggaacacaggggagggtcactggagccggctggctactagactagctccacgctcagtcaaagaaagaccctgtctcaaagaaacatggtggagtatgaacaggatacccggtgccctcctggacttacacacacacacacacagaggcatgtacacctgcacaggcatgcacacatacaaaacacacacacacacacagagacaccctacccctcataaaaaaaaacccaagagaaaatctattatctctttctgagtcaggtgaggtgtgctgaccttaacgagtaccaaatgttggggctgtgactcagcaggtgaagcacttgctatgaactactcgtgtaaggatggaattcagacccccagagcccacaacagaacccccacgagtgggtgtggcacccttcctgtaagctgtgcaatggagaggcagaaaggcaatccccacaacaaactggctatcagacgggaaaaaaaaagcacctgctcccctgagacattgttaggatagagaacaatcaaggaagacacctcagcacaccacgcccgttcccacccggtgcgctcgcgtgtgcatagatgaacacccacatacacaggtagaggaagcaagggaaagctgtctgttgcccgagtcttttagttctttagtgtgaatggtgggagtcctcagcactggggctgcccagccacttaccgtgtgacttattattcttacaaatgattctcacttcgtatagtcaatactgctcagatctcagcaagacaagataaaggctaagattcatctccaaaggatatagttatatgaacctcctccttccctgaagtatatagtagggattttaactaaaggaacatcctatcctgaactcttttacaaatgtttctcaggtttatttttatgtatattattgttttgcctgagtctgtaaatatacactatgtatatgcccggtgcccgccagccaaaagaaggcatcagatcccctggaactggaattacgaatagttttgagatactgtaggtgctgggaaacagacccaggtgctctgcaggaacgtcaggtgcttttgacccgagctgtctctccagccctgaagttcccagggagccccgtgctggtgtttcatatggtgaaagcttgtgagagaggtgcttggtccttcgtgacttgttagctgtgcattgtttggcatttcctcagtgctcaggtgttccagcagagaagggtcctggagtgttagtgtcaccaccgtggatttgagaactgctaattgatgtgtgtgttttcccctgatttgggaactgctaactgatgcttgtgttctcccccctccttgtcctggatgctagcctggctgggaagagaggatccacttggatggccgcacgttttacattgaccatagtaagtagcccctgctgtgcccacaggcgtgacagggtacaggaaggggagggtgacattaatgtgatggtgaagctttgtcattttgctccctgtccaggcagccaggtgttatgtggagagaatgataccagagagtcagtgcccttatacggtactgtgccttcaccctgaggttgctcccaagtagcccttccagctttgatcttgtgacctattaacttttgttaatgataaaaaaattttttttaagttttgttttgacagtcccttgatatctgcgcttttttaataaatacactctggaaatagaaaataagattagaagtgatgatttagcttttaaataaaaagaacgaatccacgggagcaatgttctccacagtggatgctttctttcggagcactgacttccgaggcccgttctgaacttattttctatcgtggcatgtgtccctgcacccagcccactaatgatatatgcagctgttttcctgaaaccttagtgtatctgctgaaggcgtttgctttagcacccgtggatatatgtgtggtttctcatttcatctacaagttaaactaataatccttgcttttagccagggagttgggattgggggagttgagggaagttttgagttggtttcgtttggtttgggggggggtgttttgttttgtttgtttttatctttagcgggattgttttttttcataaaattatattcatgtagccctaaaactttctgaagaaggaaacaaacaaacgagctttaaaaagcttctggtggagttcaaatccatgtgcagttggtgggatgtggttgcgtgtttttatttagttcggaagcaggaagtgagctcaagtgtattgatgagcctgttgctgagactcctgtccccaagcagtgctcacacatagaccagcgactctctgtggggaggagggacttcctcccagcgtcactaggggacctaggatcctccaagaacttgccttcaggcatgaaagttagtgggtttgaagtcagtgagaaggcctacccaaaactcagaatatttagagggcagggccacgcttagagttcagacagattatttcaagatatataagctttcgttttgtctttgattagaaaaacaaaacaaaaaaacagagttagttatacactttccagcactgtactgtgagcatacagttgtcaacatgaccactttctttctaggtacatgcatggattatccccaccccacaatattatttattttaaattctgagaactttctaaaatgggggagaggttccactcttaatgccactaaaaacagctctccataatttaccaagctttgccctgtggatgagtgtaaagggatacataccgagaagccattcttctgccttatccatcaaaatctagtgtgtgcactacaaaatccctgtgttttcaaaggttttctccggtcagtgggttctcccccagacagctttaatcacctggtggataagagttagaagctttctcaccttcagagtaaaatgttcccaacatttatctggcaaaatccaccatctatctcccttggctaccaccatgcccatgggccaggaaccgggcttctatacaggtgccataaggcattttctatgttgacagtgactgacctgagaggcagactttcagaagcactgaacgctcgtttgaacaccttgattcatttgagagataattactgacacgctttttctgggtaaagtgttagagaaatatctagaaatgtttttctcacagaccagatgtgcccagaagccgagccatcagccagtggtatctcaaatacaaaagttacaagagaaattccaataatttctgtgttcctgcaccctgcccatagttacctaatgtaggagcagtagctaacgtagctaggtttctcattccctctacttccttttcgtcgtttgatttgaaatgtaaggtctcagagaaaaaagagtatgtttagattctgccgttcgttcttttttggcacgttcttttttggctaactgtcctccacagcagactccttctgtagccccaggatcatgtgtgtggttccagcactcagactttttgaaggactttgttttctctctcggcttcttccctcagtcattacaaagacaatccattaaagctcccattacatgctacatggggcatggtaggcagtggagaggaactgtgagactgagaccttacaagccctgttctcaagggcccatgtctggtagagagtgccaggaggtgtcttaggtattgtgttggaaggtgaacctgttacttgagtgctcagcttgagagtggctgaagatggctctgtcggtgtgtgtgtatctgtgtctgtgtgtgtgtgtgtgtgtgtgttctcttctggacagattttgagcaggattcgctctaaagggcatggtgggaatcgggtttagaacaaaccagatagggccagccattccacactggtagtgagaactgccccacgggctctgcccctcaaaaaccctaaagccttggtcacgatttgtttgtatgtatatagacatttacaggagcgtgactggtggtgccacaccaacctcgaaggaatgcagtcctgttctgcctgactggcatgcaaaggaggctggctggctggcatggcacccaagacaagccgacagatatttgacagggaggactcagattcactctgcaaacagtaggagcttcagagggctattcccagagtcgaaggacagtggtcagatgtattcttgagaataaactttgggcagacctacgtaggaaatcttgaatagaagctagtaagaccatggccttggagatctagagcacggagctacagtccaggacacagatgcatgccccatccagcaagaacaaagtcatgacaattggaagatcaccaaggactggcaaggacatgggcaggttctggatcttggcggtcagtgcattatgacactgcttttgttaatgagacttctatcattgtgacagataactggcccaggcaatgtataggaggaagaattcattttcgctcacagtttcagaggtccatcaagtcctttgctccattgattctgcaccgtcatcgtggtagacaaatgtggcagaggctactcatcctaacagactggaagagagtgacagaatgtcaaggctgatgacccttctcagttttctcctttaaatccatcctagcacccagtttgtaggctggggccacccacattcagacaggtctttcctccacccacttaatcctctctggaaaagccctcacagacacacccagagttttgcttcactaatctcaattcaatcaaatcagtgggccaggttaatccttgggctgctgactggggtgtgaggttacctggccactgggcgttggcgatcacctgctcaggaagctagggagacccggtgcaggcatcagggatggagtcagaagatttgaacgccctcctgtgttgggagaggcccgtttgttttgacgacaaacatccagtcaagacagtattacccaagctgctggataaaggcatggttctatctagctgcgtcctgctgtattctgtgacctgtgttttattttggtgtttttgtttttgtttttgtttttactttttcacctcagtagcagctttgaatttccaaagtctttctcgttttagaaattagacaacctaaaatagcacccatatttaaattgtatttatttatttaaataccacctgtatctgccggtgttccttgaagcagttgagttttacacttgtggacattttctgccaaattaacatgaaattagcattgtagatgtatagtcttaaggggttggagttttttggggtttttttttgttttgttttgttttgttttgttttgttttgtttttgctttaatcataatcagcccagagcattttttgttaacaatgcctctgttttcatgaaagttcataacatcagggtttttaaaaaaaattaactaaggtgcttttagagttgaatctgtgagttaccgtcagcacactagtgggctaagagtgagcagggtgttttcagagaaacaagcgcccccccagcccacaacttatcttttaaacttagaagtaacctgttgtaccccagcctgccctttgtcacctgagtgcccagacgcacttccacctgaggctgcacacacaaggcccctctgaagcagttttaatcatgtgcaggtgaaaccccacatgacctgggcagctgctctacgccatcacctgagcccttttgtttgccttttgggagaaaggaaaactgcccagccaggctgccagggaaccctttctctgaagtcttgctcggctatgtctaattcttatttttttatgaccgacgacctttgctgccttggctatgtgtgtgtgcgagaggcacaaaggtggattatttctctgttcaatgtagaaatctctacttgaaagcagtttttcaacatcataagcaaatgctaagaagtatttgaaatgagaaagaagtgtgtgtgtgtgtgtgtgtgtgtgtgtgtgtgtgtgtgtgtgtgtgttagttaacttcctagggaactaaaccttatgccttttgaaaaatcaagatcaagttataaatccttaacgagtagaggggtttataattgcacatttaccaggttgctcaccccaaactgcaaagatatggttttacttttgttgtgcatttttattattattattattaactaatcatatatatgtttgccatgcaatagcagggttgccttctaaccccaaaatactaaattctccctggggtcaacccaaaggggctttagaaaggggaatttttctttcttaagtaccctgtagaccgaagggattagaactaactcgttggtgtttttaatgttttcagatagtaaaattacccagtgggaagatccaagactacagaacccagccatcactggtccggtcagtattcttatgtccctctcctgcatatagcttgtgactgcgtagtacacacacttcttgtgtgttcctaccgtgatgtccagacactggtgaaattgaatggtttaagattcaccccagctcctcagtgagctttccagatggggtacagctgctgggggctttcgagtggaactgggactagaaaggaggagaaaatggtattgggagcagtagcaggttgaaaggtgttcttcctggtcctttataaaaggatggtttaaaccgatagtcagaattgtctccaaccccccccccctttttttaacagtaaagcatcgttgttaacaatattttaatacaggcttaaccatgagaattaggagaaagagaagcactcggaaaaatagaaagatataccctgtacccaaaagtaggcgcaggccccttaagagagaaaaacactcctcccttcctgtttgtaggctgcaaggccaagccctgcatttataggccgctggcatttgttaggacagtgacaataaatgcatgctaatcaacctgtgcctcttccacctttaaaaccctgtggagaagaggttggaagctatggattgtgtgtggactctgctgatccaccaactctgcactagtgctgctcacgcgtgctggttaggaaatgtccatctgacttcgggccgtgagcccccgagatattgcggcactctgcagtcatggatggagggaaagtcctcttgctagtgactcactcatcggcaagtagtactcggtgagctaagggtgctgagaggccatctggttggccttttccattaaatgctcacttctgctgatttgcataattctgtttttttttttccttctgttttttcaagatgttctcccatatcctctggcctccaaactggtgattagaaatttgctgcagtaatgattgccatttcttggagggcaaatagttctctctctagtgattttttttttcaattttctcattattgttgatgttctgagagctcacagtcacgtgttggactgtgggtttccccttgtggatctcctcttcgatgcaggatcatccatgaggagggatgcatcagatctgtcctcgattctggcaaaccctcggccacctggtcccacacagccttccccgtccttactccacccgagcctttgcatcactctccatctttgttcttgtctcttagtatctccacttaaatccctgggtagagataaagttcctttgttggttccctgggcttaaggttagttttcctatactctttacagctctaagcctaggagcctgttacagcttaggtctgtccatgagacgccttcaggcaatgactcaacaagataaaacccatttctagcactgaatgttttatacggtctaaaatcagataactcagttttaaaatggggtaccaaattaaacagtgtttagatgaagcacaaatggctgagaaacacttaggtatttgacatccttggctctaagggaaaagcaaactaaaactacttttagatttcatcttaccctagtcgggttaggcgaggtcaataaataaatgacagtccgtgttggtgaggctgtgggaaaaggggacagtcacccactgcggttaagactgccagcttgtacagttgctatgaaatcagtatggggtccctcaggaagctgagaatcgatcttcctccaggtccacctctaacactctcaggcatatacccaaaggactctacctcttactactgagacacttgctcattcatgttcactgccgctctgttcataacagccagacattggaagcaacagaaatgtccgtcaactgatgaatgactaatgaaaatgtggtgcatttacacagtggaatattaaacagctgttaaggaaaataataattttcaagtagatgaatggagctagagccattcatcctgaggtaacccagagccccaaagccaatggcatggaatcttagtctgtgggtcttagcttttaaactttcagtgtgtgtgttcaattgaaataaccatagaggttagaaacccagtaagtggacagggaagaaaagatcccacaaggaagaggagagataaaggggaaactagaataagattgaatgggggaggggtggaagagcagggcacagggggagggggaagtgtggggagagactaaagattctttgaaaaaccatatggaaacctacgactgtagaggcttccaaaaatatatacacacgaaagaatttaaatggagtcaccatatgataggggaggcagtgttccaaatcaggctcatcttccataaatgaggaaaaggttttcagtgatgaggacatatcgtgaagctagctgctgatagagtctgtctaagctggcaggagaaaatgggaggtgagtggcgcccctgcctcccccacctctaaccccgatctcagtcacagttaatctaaccaacagtgtcatccaaatgcctccttggggcttcatggtcactgttccccatctgtttcctccatctctctcatttctgctcagagatacctcagagctgccttccctaggctcccacaaaataagcacacaccccccccctcccccccgcaatctctatcagctttccgcttcttaactcctacctctatctattcttttttggattaattgtactaagtagtagttttcattctgacatttgcatgcatgcatgcatgcatacctttcttcattcatctgttgcaggatatctaggctgattccctggcttgcctttctaattacctactttcctactgcctgtggccttctaccaccatgagctccaggagggaactgggaaaggactttgttttatgttgtcatttttttttaagcacttaaagtgccaggcagcgagaactttgaaaatacttgctgccaggtgagtgaggcaccagaaagagaaggtcagcacctcccaggtgtgaagaaaatgttgtttgtgaccggatgtagtgctgagagaacagaggtcatgatgacgtcaccttagctcgtgttagaatatgtctgaggtggagtgtagtgctgagagaatagagaccacattagttcgtgttaaaatccactgttcttgttctcctgctggtggctgtctatgtactagcaagtgttgaaagtcatacgggactccctcagatataactctgtccggaatgcatggcaagagtggtcggctctcgggctcatcacaaacccatgtgaaaacatgcctgcacacagaaggaagaccataggccttgtgaactgtctctagaatgttctcaagcatcctgtatgaatagaatgtcttcattgctcttgtattcgaaacaaatgacgtgaacttttctataaagaataggtttgggggggttgagggggaggctgtgtgatcatgccctaaaacagaatgcaaaggacagaggttttgctcttcactctgtctctctgtgggcaggaccaggcctgatggaaggtgctggaatctggggatgctttgctgagggttgggtacaccatggccaagttcataagtttgctgaaaggcaatgagttgctctgactgaggcagttgctgatacaatcattgtattgtatacaagatcagtccactttggttcataaatgaatcacagacctctacagtcacctccaggcagtggttggactccaggttttttcataatgaagcgtataaaggtgacttaaatagcctcgttcaaatactactttgccacatacttaaaagaacatacaagatgtacaagaactttcgacgtgttgtttacttctgagtcagggtcttattaagtggcccaggctggtctcaaattcatgatcctttgccttcgcctctcaggtgtcacctagacaggctatcaaaactttccgagacttgtatctcactgagaccttgagctcaccccggtgggccattttgtttttccacagagaaggtgcttgagtttaaacgaattctttcatacgtgttctggtttcatttcttttacagtgataaataacttggcccaaagccacccggagggacttacattccggatacaggccatcaagggaggagcttgagggatgctgcatgctggctcacacaggctcatgccttagctagcctccccatccaacccagaatcaccttccctgggaatggtgctgcccacagcgatctaagcccacctataaaaattgacagccaagacaatccctaggcagacatacacccatctgattcaggaaattactcaagtagacagctaagccaaccaggacataaagtaaaaggcaaacttgatgactcctcagtctaactcttttcaaaagactttgccgtttatgtagacttccccctcctcgaaagaggttatcagtctactgcccttcctgtttatggcatttctccacaagttcgtttgagttgcgttgttgctgttagtctcgtgatgctagggatggatcatgtccccattgcttcctgttttgagacagcatcttggtatatcgttcagggtggtcttgaactcactattgtcctgcctctgcctcctcctgagtcacaaatcagtagcatgggtaatatgcatggcttcccataaagactttttaaatgagcagtatttatcacttggggttgtgtgttaaattgccacatccaataacactcgcctccaggaagaggaagtgatacacatataaagatgctttgtatccatgtatctctgggttaccctgactcatactccagcaaaatccatatagaacaggtatctagtttgtgcggtgtgaccctaagagtttccttggctacaagtctgctgttgtgctgactagctctcatcccatctgagacccggtcctttcctgtgcagacattatgccagttttctgtagaaaacacagaatatgagtatttaaggttttgctgtccatgaaactttgccaacattggctcgctacacataagagtttgaggcatatgcttacattatctgtgcgtctggatttctcttgcaggctgttccgtactccagagagtttaagcagaaatacgactactttaggaagaaattaaagaagcctgtgagtaatgacgtcttctgaaagctctgttgtagcctgttcccatcacccgttagctcactgagaacagcatgcttgtggcttgtgtgtgcacacttccttttccatgccctttggcccacccagatctttgacctggattttccttctaacagaaatgataagtgaagactagcccagtgttacattatcaaatcaccgcaagggcaatttctcatgtgatacattagacgatcatatgattcttgcggattagaaaagaagaccaaagtcaagaaatctagggacaccacatggaattacacctctttatgtctgagatggcaattttaaccatataactaacatacatattttaacaaggtatatttttacaacacataattatattacttggtagagttgagcccaagtgtgattatcatcatcatcaacaacaacattttacaaccacgagacgctggaaggtttatacagacagtgctgagttgacagcctgtgcttattgttggcatgcctccccacccccaaccttgcgtcttctgtgttcattacctgcagtatggatcttagttttgctctcattttgcccagaaaattgatgcctttagccaaagaaagtatgagccccaatataattctttctttgcgtgagactgccaccctctgtctgctccctcccagttgatgttctaggtctgagctttgtcctgtggtaaagaagtactggtcacttctatgctcactcagaatctgtcttctgtcctatggttgtgactcaagttcttcatttataaccaaagagtttttgtcctcgaagctcacattggcacttacagtagtgtttctttgtgagttatccttgtgccctccagtgacgagcagctccgtgactattgtccttgtaagcaagcctagcctggacctcatccttccttgcagaaggctgtctgcacacctcactcacgtgctgggttacattcagtcgactctgagttcatggatgttttacccaaacttagtaggatgctggcccccactccccaccatagcaccatgaacttgcaggcagcatgccttgcatctccccactgcagttcctaccagagaagaccggttccagcttgcctggaggttataaagggttgattacatgggattaagtcttctctctttctttgactgaaccagcatcccaaggtgcctgtgtgggggaagtgcccttgtctctctccatagtggtaaggatgaggttttgggctcagtaggtgttcccctgaagattatgtgggtgattcagcctgagcagctctgaatggctacttcgctgtgtcccatcttgacacagggaggttctccctctgtgaaaggacaaacctataaaggggagactcttgggagccagctgtcactgcacatttatctgaaggccatcattgcttctgctctttggctattttcctggaaggcaggagcgtgcgcgcatgtgtgtgcatgtgcatgtgcgtgcgtgcgtgctgtggtgtgtggtgtatcatatgatcataaacttgtctttttatcttttatctaggctgatattccaaacaggtttgaaatgaaacttcacagaaacaacatatttgaagagtcctatcggaggatcatgtctgtaaagagacctgacgtcctaaaggctaggctgtggattgagtttgaatcagagaaaggcctggactatgggggcgtggccagagaatggttcttcttactgtccaaagagatgtttaacccctactatggcctcttcgagtactctgccacgtaagtgcatggaagacatttgcgctgtgtgcccttccctgcagctggtatagttttcttcttaaggaacttaacataacataacataagacaagaaactcacccatttgagatttcagtccctccctaccctaccaccctaacaagtctaaaaacaagttctgatccaacatggcgaagcactgtacactgtgaacgcctgaaactgattcttctcttgtcagtttggctcacagaactgaaactgaaattatgtcaggtgattatagagggagcaaggcagttttcagctatagtgccattctgatataagggaaaggtttgttagtgccagaattcagaggcatatgaccacgaatcattcctgaagtcacactacttaaaaggcaagtcatgaggatttgaagacccatgcttgggatacaaaggccaatgccctgctcccatagtagaaggaccaggctttgccttccatggggattcatcattgcctggcaagggaactgaggcaggctaaattgttttctcagcaaacatttggctcctattgtctccaggctgagaatgctcgagagcacgaggccgatcttgaattcccaatagaacagttgatcttggcaaaagatttagcattgctccagagtagacttcagttgatgtggcttctcctacaccttcctcctggtacctgtatgcttagggctcttttagaaggctgcctcgggacagtctccagttgacctagccttgattagtgaggttcttagggaggcttctgagagaatctactcgtaacaccactgaggtagaaagaggaggagccaaggtcctgacctctccctacatctcctagatacccccccatcactctatgctgcctggttgaaagcccctcatcctcatgattgtaaggccgacagggacccctgagtgtgctccgggggttgcattgtggacatggggctttccccagagctcttgaggtcaggtaaaccaagagacgaacgaacctttaggggaaaattcccagatcaaaagcctctcagaggaattaacttttgctcacagaaaccatctacagtagagcttgtgtgctggaggatctctgcacaccccttaccactgggagggttcccttcttctcaagatatctggttgacccacttgaaattgacattgtgtatgtgtctgtatgtatgtgcatgtgtgcatttgtaggtgcaaatgcacttgcatacgcgtacatatgagggccaaaggacaaccacaggcatcctcaccttgttttcaagacagtctctcactggcctggaacttgccagaaagctaggcagccagaaagcctccagggacccatctgtttcaacttcctgagccctggaattgcaaatgtgagctgtcacacccagcttttaaaaaatggtgtcctgaggatcaaaccaaaagccccaggtttgcaaggcaactgctttatgactgaacagccatccctaaaactgacatttctgtagataaaagttagctgactgaaagcagtttccatagctttacctgctccagtgaaccgtaactgtcaattacagaaaggcgtggctgactgatgggttacattccctagttcatatcggttgccacaaagtccccaaggttgcccatgcactgtaaaatgaagcaatgggtggcaaaggggagttcagcttcttggatttctttcatttaagtatgactggacttttctcttttcctccccaaagggacaactacacacttcagatcaatcccaactcaggcctctgtaatgaagaccatttgtcctatttcaccttcattggaagagttgctggcctagcggtgtttcatgggaaactcttagatggtatgttactccaaaatcttgtggtaatgaaagtaaggcagctctgtttgtgggtctgcaatcttgtgggtctgcagtccagtgtctgagcccacgtgtggatagtaagggtgtcacgggttttctgtagctggttttcctcaggaggttgaacccagtgtctccctccctgactcagagccccagcctacagtatgctggttgctgttttccccctaaccgtggtaacttctgatatagtcttgagcactgaagacaaagcatctatctatgctcatatgtgtaactgttaagtgtgacgaataagttgttccatgagtttttcaggacagctttcctctgctgagagcttgatccagctgacagatggaaattttaattgtaaagttaattaaaatgatctcatccgccagcagcctgctattgctccattttcccccaaatcagtttttaatgatttcagagtaacattatcactcagctaaggccttagccctagagtgtcttctgaagaagacagaacaaaagccgtgtccttaagaggaaatacagaactccaggacatgagaattgaggactcaaacctcacttgctcatgggttactgcaccaggtccttggccattcagtcccgacctcccatttacatggaaagcagttcattctttgattccctttgcagatacttaggggtatcaggggcttaaaactcaaccaagtttttgccatatttcaggattcttcattcgaccattctacaagatgatgctggggaagcagataacgctgaacgacatggagtccgtggtgagtaaaagcagtgcgtcctgtagccgtcacaggctgcctcaccctgtgcacggtgtcaggagctgtgtttgcagtcacagctgttgtcataggtacagtcctgcggaacataggtacttcacatgaacaagagggaggaatcgcttgcttgaaatttaattgatctcctgatttctataataagcaaattatggttggtttctgaaaaaacatggtacttaaggtcggtacgcctaagtctcaattcccacttaacgaactgagacttgatgagcagattaaacctgaggggcacctgaagcccgccgtagccttgctccccatctacagtgtgacaagattccaccttctgttttatgccttcatagaagtggtggaggcaaggccaaaacaatagtcatctagacatggtcgtctcgacacaggaattagtgacagctgcagaatgggagcgtgggatgagtgttagacaggctggcgctcacagggccccatgcttgctgcttacctggactgactgtccttggccaggaaagatctacgaaacaaaacatgtccttcttttcagaggacacttgaatgtctggctttctctatttatgtatactctgtagtgtatgtgtgtgagtctgtgtgagtgtgtatgtgtatatgtgtgtgtatatgtatgtatgtacatgtgtgcgtgtatgtatgtgtgtatgtttgtgtgtgtatgtgtgtttgtgtgtgtatgcatgtgtgtacgtgtgtgtatgtttgtgtgtgcgtgtgtgtgtatgtgtgagtctgtgtgagtgtgtatgtgtatatgtgtgtgtatatgtatgtatgtgtatgtgtgcgtgtatgtatgtgtgtatgtttgtgtatgtatatgtgtatgtttgtgtgtgcatgtgtgtgtatgtgtgtataagtgtgtatctgtgcgtgtatatgtgtgtgtatgtgtgtttgtatgtgtatgtgctcctgtacatatacataagtgtacacacgcacactggcctgtgtgtactagctacatttttgttcttgtagaagaattacagctctgttttcatgtggtcacttgagttagaaagctgtgcatcccttggccccgctggcatatggaccgtgtgtgtcttgggcagagctgtgaatgtaagcgatgcccatgatgccagctagagctcactgtgtttctgctcggtgctgcgggaggcgagagacgactattgcactctggacctctgtgacctctgcagactggctggcgtctgtaatctcagctcagtctcagtttcccttcgagcctcccctttgtcaatgctttctgcttctgctgtgccattctgaggagtctaagagcacagaaattgcttctgtgcgctcccaaccctcagtgaaggaagggggtcaagagaggattatcactgtgtatggggtctagcttggcttagaacacacagtcctccggcctctactcaagtgttgggactctaggtgttcaacactatgctgctggaaattgttcttaacgcccaagtctgtggttcctatcggccactagtgtttgggggagcttgttattattttgttattttaattactatgtattaggggagtggcacatgccaatgagcaccggtgcccatagagaccaggggcatcagagtttccctggagctggtgttacaggtgcttgtgagctacccagggtgggtgccaaggatcaaccttggatcccccaaagagcagcgcacattcttaactgctgagccatctctgctctcccagcagagcatttgtgttttaaatgtgatgtgcatataattttcggtctcctttgagcctgtcatattcctagcaatggagactttgggcatgagcagaagggacctgatagcctcatggctactctcttctaaaacacagctctgctttttacttaaattaatgggcaaagaacactgaagaaacaggaaaggacagagcacaaaaatgtatggtgtttagttagaacactgtcctacgtggtctctgatagtagactctgagaagacaggaagtcggtgtgttaaattctgtgtggacctgagacaggcatgctgtggccacaaacaatgcgtagccaggctataatcccagctcctggatgctgggtcaggaagaggagttggagaccactgtggggttcccaaacaagaccccctaactctccagctgctctaactcccctcccaagcaggtggccttcacagtagagaacaggggaagtcactttccacagatcttgtgttttacattagtgggaagatggggctcgagagatgactcagtggttaagagtgcatgctgctcttgtagaagacctaggaattaggttcctagcgtggccaacaaccagccacctataacaccagctcctgaggctctcacctgaacacatgggcacacatacacacacacacacaagtacacagacacaaaataaaatctaagtaagtaagcaggaagtggttttgttagagcagactccctgagtagcatcgcccttggacattgggcatagaattacattagaatgaatttattcataaaggagccagacagattttaaaattctcacgtttcctttctatgtcattccgataggacagcgagtactacaactctttgaagtggatcttagaaaacgaccccacggaacttgacctcatgttctgcatagacgaagagaactttgggcaggtatgtgggttcgtccagctcctgtggctcgtgtccctttgccgtggactataggacagcatggctagacagttagaaacagccacacagactttcagctgtcagcagcactgtgagcagcatttgactggcatgccaggacaccaggttccctatcatagaatttcctgtttccctgcaaagctagtaaattctaaaggctgctggggtctcaactagcacccccagttctaacagtcatttttaactttgcatctggaatagaggttcttcagaaagcagtgtgagtgttcgctttagcgggtccacatctggtcaggtaccagtgatgagccaggacacggagactttttcctctatggctctgttgttatgatgtgactcttacgcgctgagggttgttttgtttggttttactgttcttccctatatcaccagtcagtgtggattcgtcatagttacttccagagtggaagtcacctggttgggatcttggtggttactgtcagaatctaaggctgtgtacatcttaaatatggaaacttggggttagttgtcccctagtgacagtatttctcaggaggtatcttcaaggtagtatacatctacacaaaagcccaggcatgattccagtctctgcctggccttgggatgaactgaggagagctcacagtaggactgccatggggaaatcttgatctgcatggcttgagggaggatggagacaggtgtctgtggctcagactgagaggtaaagtcaggaattcagctccctggtgatgtagaaattatttaatcccaacccagggtttctaccccatctttaacccttttagttcccagataaaagacacacacaacctttatatttacaataagccttaaacagcacaagaactgggcaggtatctaccctctatgctattataatctactttcctatctataaccctgagttattacttaccatgtttcatctgggctgctctgaactcccaattggccagcccttagggccatgcttttatggctcagctaacccatggtagcttctttcttcctcttgcacctccttcttctccttgtggtcctcctctaaccctaaatgacacctaaaccccatctatatctcttctgcccagctattggctgttggcatctttatttactaatcagaaataactctggggcagggttacttagtatctacatgtggactctctcctctctggggcaaccagtcttggggggcgggggggggggggcatattagcattagaatacaagcagcatcaggccagcccactacctgctggcctcccaggttagagaaatcttagaggatcacagagggggaacacgcgatgcagtgaagtaggaagcaatgagtgaaactggagtgtggggttgcagactgaggacgtgatcgtggaaatatccgagctacatttttacctgcattccatgcattggagcaggaagccagccctaggcgctggcagtgggaagacctggaggactctatttgccttcccagggctggggaggttcatagaacaatgtcaggacccagagagaaggaaccttgtgactttatgttacacctcactagtcatccccgcccttgtcacaccctatgttgatgcttcatacccaagaaccccacagacagcgcctactgttcctgtgactgggggccttgtcacagggcagggagaaggcttgtcatggccctccacctccgagcatagggccttcctggctcctcccagtcctgcctgtcttctttgattctctgcactccctctgggaagggcctggaggccgggcatccatgctttctcttgtggctctgctcacagggctgtgtcacaccactgaccctctgcctgctcctttctagtcccacccactccacccatatgacctcatcccatttgcagctccaccactgtcccccacctgtgacccatatcttctccaattgtgctctgttcagccacctccttatggctcctcccaaagagcccaggctcctagcggtacagcctttgcctcctgtctgtctccacagtagtctttctcctcagtagtgaaggggaagtgtgattttgaggnnnnnnnnnnnnnnnnnnnnnnnnnnnnnnnnnnnnnnnnnnnnnnnnnnnnnnnnnnnnnnnnnnnnnnnnnnnnnnnnnnnnnnnnnnnnnnnnnnnnnnnnnnnnnnnnnnnnnnnnnnnnnnnnnnnnnnnnnnnnnnnnnnnnnnnnnnnnnnnnnnnnnnnnnnnnnnnnnnnnnnnnnnnnnnnnnnnnnnnnnnnnnnnnnnnnnnnnnnnnnnnnnnnnnnnnnnnnnnnnnnnnnnnnnnnnnnnnnnnnnnnnnnnnnnnnnggtttctcatccgtgatgttcctgaaatgcatgcgagcttcctgtcaccttcagtgtccttacaacttataaaggtcataaccccttacattctcatactacccagtcctcacctcactgtctgacacaccctccctcagctttacatgtaatggccctcttagcatgcccatatatgtgtcttggtgccacggtattgccagtaccatgtgccgtctccagacccgtgcattctctctgtcttagcgcctttcctaccctcctccttgtcatgggctgtctgtaaaccataagcagcttgaagcaccttgtcttagtgtcatccatgcacagctcataatatatacgcctactgcatgcctcctgagcagatatagtacacacccaaatgtagttgtcatctaattaatggtaggccttcgcaggataatacctgtgtttcacctctgcagctcaaatgccaaaagtcagccacttccctgggatgggacctaggtaatagggacatgcctcctggccgtggagttattgtgtctcactgcgcagttagagtttgtgttggaatgggacccttggaagtgctcagaacatcatccctggcgaccagtaacacaagtgaaacaggaaggaggtgacaatgctcccattaactaagaagctgcaccaaaccagacactattgtggatgccaagaagtgcatgctgaaaggagcctgatatggctgtctcctgagaggccctgccagagccttatacagaggcggatgttagcagccaaccattgtactgagcacagggttcctaatagaggagttagagaagggactgaaggagttgaagggatttgcaaccccataggaagaacaacaatatcaaccaaccaaactgcccagaactcccagggactaagccaccaacaaaggagtgcacatggctccagttgcatatgcagcagaggatggccttgtcaggcatcaatggaaggagaggtccttggtcctatgaaggctccatagatgccccagtgtaggggaatcgaggatggggaggtgggagtgggtgggtgagtggaggaaccccctcatagaagggggagggaggatgtgatagggtgtttctaggaaggagagaaactgggaaagggcataacatttgaaatgtaaataaagaaaacatctaataaaagggacaaaaggaagcagcagtagctgctggtgtccagaggttcaagaaggggacagtaaaataccttgctgtgtgtgcatgtgtgctctcggccacctgacagcagacccagttggcagagccacccttgccccaccttgttgccacggcctcattatttaatatgaatagtctagtctctttctttcaaaagcaattctaccagcttaattgactcttaataaaaataattaagccagcataataaaaacatacaaaaatatatgtctctcacgattccaccacctcaagaaaaatcacagtgagaatttttacttgtatcttcctgcattggtctgtgcacacccacaggtttgcttgtgtttgtttatggaagtaaaatgagatgccttcctacatcagtaaatattctgtgctgatttgatgactacaacaaatgtcatcttacagatgttctgtatattttatttttgcccttttggtggctacatagtcttctttggtatttactatataaactgacaatcctggtatatagcatcaactgtacagccctgggaataaagtatgtgcgtgtgtgctgtatatgccatttttcctttaacataatttctgagaaactgttaccaaaaggagaaaatggatacagatctagagacccacatgataggaggagagctgacctctgaccgcttataaaactaacaaatgatctctgtcttaagtaagtgtgcgtctttctgtcctttctttctacttggttttgttgttgttgctgatgatgatgatggtggtgatgatgatggtggtgatgatttattgagttttgtttgttttgtttttttttaattcttatatttttgctgcttgaaagaaattccatgaatatttctttgagtaacttaatttcttgtaacaaacagaattctagaatttgcatctctgggatgatggttgattggagtttggatctctgtggtctggatggatattctctggtgtttattttttttaccttgaacatatgttttttagggttggttggttggtgggtttgttnnnnnnnnnnnnnnnnnnnntcttaagtaagtgtgcgtctttctgtcctttctttctacttggttttgttgttgttgttgttgttgttgttgttgatgatgatgatgatgatggtggtgatgatgatttattgagttttgtttggtttgttttttacgttcttatattttggcctcttgaaagaaattccatgaatatttctttgagtaacttaatttcttgtaacaaacagaattctagaatttgcatctctgggacgatgtttgattggagtttggatctctgtggtcttgatgtttattctctggtgtttatttttttcactttgaacataatatgtttttaggcttggttggttggtgggtttgtttattgttttttggggggtgtttgtttgtttgtttgttttggttgattggttgtttgttttatggcttatttgggggggtgttgggtttttgtttgtttattttgtgtgtgttttgttgttgttgttgtttttttgtttttttcaagacagggtttctctgtgtagccttggctggcctggagctccctctgtagaccaggccatactcaagctcagaaatccacctgtctctgcctcctgatgctgggattacagacatgcatcaccactgcccggctcataatgaatttctttataaatgaataccacatgaaaatgttgctcttcttcactgttgctaatgtatgaagaataattaaaacccataaacaaccataaaatattcttcctctaatagtaacatcgttaaatgcataggtcttggaacaggtaaaagggttcgctggatactttcctgtacacagagcccattgccggaaaatgtttttgaataagctacacttctcttctatagtaagatgttaatcagtaataatccaaagagcttcatgttattgactattgttttggttttttttcctctaatcccagacataccaagtggatctgaagcccaacgggtcagaaataatggtaaccaatgagaacaaacgagaatacattgagtacgtatgcacgtacttatcacattttcttctagtgcgtgttgtgtgtgtgtgtgtgtgtgctgtgtgtgcctctgtgtctgcaggtatgcaggcatggggaagggacagaggtcagtgtcctgtcttcctcagtcactgttcatcctattcttatttttggaaatggagcctctcactgaacccagagctcatcaattcagccaggtagcctatccagtgtgctccgtggatttgctgtctccacctctatgcagaaggagcacacccctgtgcctggctttttggtttcttccatgggtgttgggaccagaagtcaggtccttccttacattcgcatggcaagcacttgagcaattgagccatctccccagtcctttccaaaactgcttgtgcatactgagaatgtgaacttaatatcattttgtttgtttgttttggagacaggatctctctattatgcagctctgactatcctagaactcactctgtagaccaggctggcctcgaattcacagagatccgtctgctgcaattaatggtgtgcaccaccacacctggcttctcatttaaacaaaagaaatgtcttttttgcttggcctactaggctgttaagtgtgggaaggaaattcaccctctctcatggcttctgtgaactacagcagcaaaaagaaagggtgcattatagtagcgtgccaggtcctcttcagggatggatagcttgtctgaaattcagaattgcagcagtggaaatgtcagatactaatggggtagaaattagggattgccgtgtgtgtgtgtgtgtgtgtgtgtgtgtgtgtgttttctatcctctgacttgctttccatgctggaaactgagggaaatattgcaaacatgctaagtcgatctgatagttgctgtgtctcaatgtaatctcagcctcttgctgtggaacaaatggttgagtccactcatcttcagtattaacaagtgttagtgtgggccagacacagtagcacacacctttaacctcagcactgggcaggcaggccctctctcaaattttttttctaaaatctcagtgtatatactatatggtatgataatatacccttaacaaccatgtgcgtaccgttcacttgcaagaaaatgagtggatatgagtgatcacatcctgacttttttttttttaattaagagatctttacatttttttatgtgtatgggagttctgcctgaatatatgtctgtgtaccagtgtgtggctggtgtccttggaggcaagaagagcgtcagatcccacgagactagggttacagacaattgtgagctaccacgtgggtgctagaagtcaaacccaggtccgatggaagagcggccagtgctcttaaccaacaagtcatgtctccagaccaccatctcttcacatctgtggagcactttgatcccctgaggtctgagataggccgggagactcactatgttcttggcaacctcagagcatggatgtctcatgatggtgtggtggtggctcttaaaggaatgcagggcttcacagtgggcgggcccaagcaagctgatccctgcctcaccctgttgttcagggttctctgttcatccctcgaaaggagcagcaggccccaggcataagaaaactagtatcagtggacgacaggggtgactaactgtgtgcctttttctctctcagcttagtcatccagtggagatttgtgaacagggtccagaagcaaatgaatgccttcttggaggtaagccctgctaatggggtcaggatggggacagagccatcacgggctgctcactctgttggccctttcccaagatgggactgttccatgacatgctgccttcttcttttctttctaaagtgttctcttgctttgcttctctccattttttatttgttttaatagcattgctgcttgcttgcttgcttgcaaacacagtttgtgtagcacatgctgccctgacaccaatggtaatcctgcctcagcctcctggggctaggattatagcgactggcttcccacctgtatttgtttgtttgccttgaatttatttatttatgtgtgtgcacacacaagcatgcaaacccacaggaggatcgcagcacaactccacagagttggttccctccgtccaccatgtgggtcccagggatggaacttaggtcctcggccttgatgaccagcacagttacaggctgaaccttctcaccaccagacgtttccacacctgctctagagccattaccttgaatttctaggagtatctggaggtaggagaagtgccagtagtggtacctgctactgtgcttccaaaaattgtgctctctctctcagactccccgacccaggcatactgaccttccctacagagccctcccctgtgtgactctaaacttcctgtagattgtcccctttttattctcagggcttttatgttatatccagatgccagctttctccctgtgatggaataaatgaagccaccacctctcctatgcatagtctaccacaggggacattccccaaccccttcgaatggagggggtctttaccataaaaagcatttcatgttggccaacgtgaaattcctttttaataatgatattcgttgtttaaaagcagcccgaaggactggtgagacggctcagcaggtaaaagtgttcgtcggtcaatgcaaagcctgaccacctgaggtcaagcccccagtgccactggtataaggagagaaccaactcttgcagagttgtcctccgcctccacacatgtgtgtatatgcacacaataaataaatacatgcatacatacatacacacatacataatacatgtaatatatcatacattcatacacacataatacatacatatataatatatatcatgcatgcatacatacatataatatatacataatacttatacatgcatacatgcataatacatacatacatataatatatgcataatacatatacatgcacacatacatacataatacatacatatataatatatacatcatacatacatataatatatacataatacatatacaggcacgcatacatacataatacatacatatataatatatacatcatacacacatacataatacatacatataatatatacataatacatatacatgcacacatacataatacatacatctataatatatacatcatacatacatacatacatataatatatacataatacatatacatgcacgcatacatacataatacatacattcacacacataatacattatatatatatatatatatatacacacacacacacacacacacacacacacacatacatacatacatacatacatacatacatacttacttaaaggaaaaacccagaccccctggtagtcatttccagagtcatttcctatttcctctctcatcaaacagctctcttaaactcagccctgccctgagcaggaagtgcacagacatcagggcctaaggatgtaagctgtgagggtgaacttggccttggcccattttgcactaagtttaaggaagaggtctgaggtagcagattcccagccctgcccagctttgggggaaccacagagttgagagtctcttcccgggtcaccctctaactaatggcagcccaggggccagaggctggcttgttttcctgtcagtcctaaaccagctcactcagtcctccacccatgccttcagcgtgctatttttaagcgtgcctctcacacatttgtggtctatgcacggacacactgactcacaaaagtgtgtcataagtggcttttgcaatccgactgcctacggcatccctcgtaccacagggtttcaaaaagtgctcaagtgctggaagctgctggactggacgcattctcacgtcctgtacaagacttgctattattggaactgtggccacctgacactgttgttgccgcgtgagccagcagtaaagagtgagctttatctgaccaactgcaatctcatttgatccaggaaatcgttctttttttgaagaaaagggtgcttaagatgtttttatcttttcctttcagggatttacagaacttcttccaatcgacttgattaaaatttttgatgaaaatgagctggaggtttgtgttatatttttttacataatataaagtacatgatcttaattaccaacttactttgtaagtggcattttgcattctctgacacatgacatattgaatgcacatggatggagtctagtgtgtgctctgttgtgagaccggtcttctgatctggggaggcttagcaatagtcgccgagtagacttgttgactgtgacagtcagttgtgcatttctagtgaagagagagttctcaacctgcatgtcccacaccgcttacatctgatcgatttccttgctagttgctgatgtgcggccttggtgatgtcgacgtgaacgactggagacagcactctatttacaagaacggctactgccccaaccaccctgtcatccagtggttctggaaggtaacgccagctctctaggcccagcctctgcttccggctcttcctcccagtcagggctgaagtcctgagctctgtgtgaggcccctgctgggaggtcagagtaggaccaccctcaggcatgcactgcctcatccctatatagaaatcattttctcaacttttttcccccatagccattttgatttttttttttatgtcttgcaaccaaagatgcaaattaaattcgatttaccatcccagggccagggtttctagtctgttgggctcagaaaagcttcggcaaagacggtaaactaaacaaaaacaaaaaaaaccccagctaattcctctaccaaaaaagagttttaattaaaagattatttacatataaaaaaggaaatcaggcctgcctagtagcatgtacctttttttgtttgttttagacagggtttcactatgtagcctaggctagcctcaaaatagagactcacctgcctcggcctccaaagtgagtgtggaataaaggtgtgtgccactaaaactagcagatgttgactttaaaaaattaggaaatcaactaatatgttctaacttctgaatgtctgttattatatgtcatgtgctgatgagatacagaggggaagaatcataattttcaaagattaggacttagctttggttttggattgtcttatagcggatcaaatcacttgcccaggaaagccaggtcagttccgggaggcacacagatcgggtcacaggcccatgtatgactctggtttccttctatttgtaaaatatcattggggaactttctgtggtcctatctcatcacttggcttccccttgtttagataagtctggaacactgctggttagaactggcttcagggagacaccagatctcaaacgcagaaacctaagcttgaccccatcaaagggttttctttttatatcatttattttggcctgctggcaaaagaaaaagagacccagacattctaagattagaaaggctgggattgtagcgactgttataaagggtgagacaatgccggtcttggtataggtgactccatgcagtgtaaacgagaatttggttgcctgcctgcgttacagcagggtgtggtatggtatgtgctgcatggtgacagtgaccctctgcctccgacaggccgtgctcctgatggatgctgagaagcgcatccggttactacagtttgtcacaggcacctccagagtacccatgaatggatttgccgaactctatggtgagtatggcatgccccagagtcctctgtcgtcctatgaggacccaagcaggcaatgaccagccatctcggcccctttccagaccacatgtatctgtattagttccacagagacccacggagatgcagaacagagggcttcaacccacaggaactgaggcggtgttcctacagagaccccctctctttctccccccaccccccttcttcattgttcaggttttttagtttggtttataaaaccagatttttcagaatcacccatatggttgaaagctccctcctcccagactgcagggctctttttgctccatgcatcaaagctttacattgcattactttcccctgaggtagaagccgtgcagaccgcactctgaggttccttctccctttccctaagtcccaccacaacttcgttctactgcttcaagcccactgatgcatctttttccttttctttttcttttgtctttttgcccaggttccaatggtcctcagctgtttacaatagagcaatggggcagtcccgaaaaactacccagagctcatacatggtaagtcacccaatcctcctgggggctggagaggtggtttccatttgccctctgcagaggacttgggtttggctcacagccctgacctggtggctcataaccatctgtaactccaggtccaggagatttgacttccacggggcaccaggtacacatgtggcgcacatacacgtaggcagagcatgcatacacataaaaatgaacctaaggctggcccggtctcaggtgccagcggggtgaagccatcatgggagcatagtacactgagctctgcccacccacagcttccagtgcagaagaacagttgtgtaagacgacaatgcaaatctttccataaaggggagcgaagcttaagccatgacttggatgggtccagtgtccttgtaggcggaagagtttaagtctccgtgctcccaggaatccccctaaaccatcttcccaactatttcagagcaggggctgctttgctcactgtctatgagtacgacagtccccggcctctcacacacttggactttttttttactctcactttaaattggttgtttcaaaataaggctaagagacggtgatggttctcctgccatcaagcctgacaacctccgttggatcactgagacccacagggtggagcgagagagagccaactcctgcaaactgttgtcccatctccacatgtgtgctgtggtatgcgcacatgcagacaacaaacaaatgttttctctttttttttagtaaaattaaggacaaaattccccatagcgacatcaatttaaatggccttccattcacacagtctgagtgacccatgagctgtggcaccatcatgtctctctggctggagagggaggaagaagttcaaggaattggcttgagaagagccacacaacacccaggacagggacagacaccgcttaggagattttatagcagcattcagcaagctccttctagtccaaactcagttgggctcccgtgtttctgcacaggctttggcttcccccttgctttgtagaaggaggagggtgtggccctgcctttctcagcatggtgagcatgctgagttgatgtgagcatcctttctcacccaccgtctcattctttaaatgctcttgggctgggtaagagagagcattactcaataggggtgacttgccttacttgacatcttttggtcacttgctcccaccccttttgcatatatcctgatccaaccctcccatgctcctgggagcatgtctctcccttttgcacttgaacagagtcagagaacttagatgacgtgcccaaagtcacagattgaaaaggcaggatttgaatttgccccgtaaacaaatagccttgatttcttgcagaaggcatccatccatattcaaagacctcattcttgaagggtgcgctatatcctccccaccccagctgaagccttgttgttaagtagcttttaaagaatgcagctctctctctcgctctctctctctctctctctctatatatatatatatatatatatatatatatatatatatatatatatatgtatgtatatatatatatatatatatacactcactggtagccaactgaatagcagaggtgactcagttttctggagcccagaatagcctgggctctgttctaaggtctgcaacactcctaggaatggggccccatggaaccttggccttaccctcttgcgtaaggatctgcatatattcatgactggggggaaaatatatatgtgtgtgtgtgtgtgtatgtgtgtgtatgtatatatatatgtatatnnnnnnnnnnnnnnnnnnnncatatattcatgactggggaaaatatatatgtatatacatgtatatatgtgtatgtatgtatgtatgtgtgtgtatatatatacatatacatatatacactcacacacacacatatatacatatacactcactcatgctcagaacacacataaccttagctgcttcacacctacaacagttgactcaggcatgatggagcagagatagtatgagtagtagtctgtccatccttcatttctgaggtgtgcatgcctcgtgctccatgagttttctttataaaaaaaaagggggggtgttttttttttattataactctgtgtgtgtgtgtgtgtgtgtgtgtgtgtgtgtgtgtgtgtgtgtgtggtgtggtgtgtaggaaggggtgcacatgctaccagtgtggtcagaagacaactctgcagtcaattctccctttcaccctcgagtggcttctggacattgaaccaagactgcaggcttgcctgctggaccatcttaccggcccacatgtttagtctgtatatgttggtgcttgtcttgtctttgaatctccctcccagcagcagcaaaggagtcatggacagttggaagattcctttcttttccctgttggtcgtatggcctgtttggcataggcactgtcatagctagaatttggctttggataataaaatgcgactgtcttcttaattccctagctcaaacagccaatgcctattagccaaaaccagggagtgctgctatggccaggagaatggcggcccctcacctctactttcctttcctttggcagctttaatcgccttgatttacctccatatgaaacctttgaagatttacgggagaaacttctcatggctgtggaaaacgctcaaggcttcgaaggtgtggattaaggaaggctccagcgtccggggcactgcccttccagcaagttccaagcgcacttttgcatttgccgagcagacttttgcagagccggtggcagaagcagtggcctggcccggctctggagcccagcttgtctgggccctgcccaagttccgccagggaacccagccccagctcaagtgccgccccctcaccgccaattctcaactggttgccgtgtacactgattacatttcaggaggacgtgttctatttatgttgtgcctctgcaggcaaagcccttaataaatattttgcatactttctaatgacaatgaatggaattaatcacgctacaggtatagtattacaactcatgtttactttttaaaatgatttagactgattttcagcttttatttcattacaattaaagatgtctcatgtacttggaaaagtgagcatattttttttttgtatttgaatttcatatcaagcttaatgtcagtgacatttttttatttttgaagtactttgacactcccagcctctactttattagaattggaagacgaatttttcttcaaaagccttctacagacaaatacttttgaaagaacttcaaatataacattaagcataatattttttccaaactcagaatgaaaataaactggatattactttttttttttttgtacaaatttagatactaagtccaggctggaagaattgtaacatagcatgatatctttgtgttaacttgaaaggactgaccccattgtcccttagaagtactgacgtgtgccatcacgcatttaagacaggattggactgtcatctcgcatcagaaaccgttacaatttcctgttgctgtacagcctcttctgaactctcttctctctttggtgttcatagagacatttccaatggcattgcttgattcaaaaccaaggaaaccagaaccattgatcttctatctctgtgattgctaagcagtagccaaataaccttcctttgctgtatctgcgtcccttctgaaggcactttatggaggtcacatctggttttgtttccattttttttttttttttcacgaatatcactcgtggcgattgctcctgcctccctgcacaagtctatccggtgcggtatctatcaggtgtgaacttggctgctagcgtatgaacccagatgtgacgcagagcctctgcagcgatcttctccaactgttctgtaatctctactcaacaataaggttttagttactgtatacacttaaccaagttgtgtgacctatgacctactttgcatgctctgatactgtgtgccgcccccacccccaccccccaggtcgtgtctgttgtgtgctagtttaaaagtgacctagaaagcccagtaggaaccacagagctcaagctgtctggctcaagtggtggaagagtgagggagtctgcagtttgtaagtctcgttctgttgtgttctgagaagatgcctgaggcagtatgggagtttcaacacccctgctgtccctttaacttgtattgtcctagaccctgtcctggaagttagaggacgtggggtatttttttttttgatctcttgccagttgtgaataagacagaaagactgtgttctctgttacgtaagaagggtctttggtagaagaaattgctcgtgtttacacagctgtggatgccatgaagaagccgtggacattcttggtgggtgaagccctagacgatggaatcctaccaagctgaacgtcggcttctatccatatgctatcgagtaattatagaagcaattaacactcactgttcttgcctctggtgagatatttttctcctgtagttaacagatattgggtggggggaggggagatacttttttttttaataaccttccaagtccagaaccatctctgttatagagtgtgccaaagcctgagctaagcagtgtattttaatcgaagaagaaaccaaaatctgttctaagaactggggttctatacctctgtaggccctttattgaacagcattattcactagatgcaaagggagccagcaagatggctcagtgagtccgggtgcttgtcacctagcctgacattctgagttcaatccctgggacccacctgataggagagaactgacttctacaagttgtcctctgacccaatagatttacaaacaaacaaacaaaagattaaaaataagaaaagaggacttaattctgatcttttctaagccaagagcagaaaagacttcttaaatccactccagggaatacttgaaaggcaagtcattgtgactaacacttcagttcattggcccatgatcatttcagattttaacagctgttactgttattggagatcggagagttggcctgttagaaattaaaaaatacagtacagcttgccgttcctctggtttgtgaagtttcactcgttgcctaaaatgcccgatgcctcgtctccagaccttgctgcccttgcctggtcatctttgtacagtaattgtaaatggcagtggagactatggtgttcctgaggggcaatggcaggtcactctcccgatctccctactaccagccaggtgctgtttccttctgagctgtggagatcacaccatcctgtcgccctgcagataattgtggatcatttaccttgaggctgcagagtgggttccaggactcttacttcactgtggagggacttcgagcatcaggtggctctctcatgttcctgccccctttactccatgccaaacttgggattagacagcctgctggctccagaaaaaaggtcttggtaggcattagtctatcctaggtgcccccagtgcactgtccttgtctgtctgaagcacccatctctaccttccctggccagtcctgacggttcacaagggccagagatatggacttcatttttgttcccaggactgatgtagcttagtggcaagtgtctccctggcatgtacttagctgtagatttgatcctcattgctgggactggggacggggtggataagaaataaaaattctgtttctgaggacctttagcaagagacagaaaatcctgccattccagttggaaattatataaaccaacatgacaagaactgtttccccccaaaaggcccagcagctgacttttagaagtgaggttcaaagtctttaaccacttctgaatctcatatggcctgttgctcttgatcttgctagactccggtttgttctaagagtcaggcttacgtagtatagcagcttctagccagttctctattatcctggtaatattgtttctcagctctgaaatttgaaagtctacgaagaaagcctgggttcatcagctgcccagccccacctctccactgagcgctctccatctccctctctccctctctccctctctccctctccccctcaacagaaggaagaaggctatctgttgtcattctcttcctggccagtaggagtgctgctgtgcagggtcactgcctgccctgctccctctctggctcccagaagatcacatgctacctctgtctcatttacaaattggggtatatcctaagtcatgtcaaactgccgatttcaggactgggatgtgttttaaaaaaaaaaaagagaaaaaacaaaaaacttaaactccactttgtaccttagattttaaaactgggtagaaatgtaatatacattggaccacttttttaagccttaatgaacagtgtatatacatctgtgtatgcacactccaccccagagtgttttcagtgtgccagagaagcagctgtagcgttaggacatgagcctgtctagtgtttcctaggaaagggatagttttctgttggtatagcattttctaaggaaactactcactcagcgcctaccctttgttagaagtgttgacgctccaagcacgcgtgtgaagcaccatgtatcttggccggtttcatatttgtaagaagcaccggtaggaacctaagagcatcggttggagtgtgacctctgatgcccctgcattcccgccactgtgtctctgtgtattgaaagcctctcctgtgaccacagcctgtgttgacagatgtctgtcccctgtgcaagccagtctgggcnnnnnnnnnnnnnnnnnnnnnnnnnnnnnnnnnnnnnnnnnnnnnnnnnnnnnnnnnnnnnnnnnnnnnnnnnnnnnnnnnnnnnnnnnnnnnnnnnnnnnnnnnnnnnnnnnnnnnnnnnnnnnnnnnnnnnnnnnnnnnnnnnnnnnnnnnnnnnnnnnnnnnnnnnnnnnnnnnnnnnnnnnnnnnnnnnnnnnnnnnnnnnnnnnnnnnnnnnnnnnnnnnnnnnnnnnnnnnnnnnnnnnnnnnnnnnnnnnnnnnnnnnnnnnnnnnnnnnnnnnnnnnnnnnnnnnnnnnnnnnnnnnnnnnnnnnnnnnnnnnnnnnnnnnnnnnnnnnnnnnnnnnnnnnnnnnnnnnnnnnnnnnnnnnnnnnnnnnnnnnnnnnnnnnnnnnnnnnnnnnnnnnnnnnnnnnnnnnnnnnnnnnnnnnnnnnnnnnnnnnnnnnnnnnnnncacacacacacacacacacacacctcctaacgcaaagctgagtgctatttgatacaatagtcaaaaccaaactaccttgacatttttctaagacagcttaatggctgatgctcgtcttcacagcccgtggcgggctttaacgtagctcgaatctggtacacgcataaagttttacggtcaagtccttttctttcttcttgagagacctaaagagatactgtagcttgtttttctgatggcaaatgggaactgtgacaaagtgaagtccttgtaaagcggtgatacaacttgtcaaatatttaataaagaattacggaagctggaacatttcctacataagtatcatgggttgtctggcttaaagcttcttcaggaatggttcatttcaatcacgtcagatatttaaatgactgcagattttaggtgtggtcatttccttaatctgttatacgagccccaccttagcgatggagtctgccctgagttctcattataaggctcatttgcccccatgcacatgctgggttttgtctttttttttattaaacctgagcattgcccgctttatacagcactcatggttttatcactccatccccaggaaagcaaactgacttcacctctgcttgccagtgtgccccggactgggagacggtgaatgacattagcaaccaagccacggtggttctcagaaagatggtctggatatccagatgtatgaaaggttttccactaaaattcaatctcttgggactggagagatgacccggtggctgcttttcattagccaattagtgctttcccagaagtcctgagttctctaccggggctccttgggcccagggctggatagaaggctcagtgcctcaaagagtgtcctttcagcactgcacctttgcagtggctgcccagaggccaccctccctccaggttgtgccctgtgctgtggtgtctctctgttcttttctacttctgagcccaagctggctcaggctgccttccctctggctgcaaatcccagagcaggaagggtggccctgggagatataaggtgagtggagactgtcacctgcacctccagtagagtgccttgaccctgctgaagacaacccaagcttgtcaccttaggggtgctggcctcagtccttggagacatgaaccctgcaatgttacttcttgttggtgctgctgaacttgccagcacgggagctgatggcctgttctaagcacctctataggccctatccccagatgctggtagaaaatctttgtcctctgtaaagaaagggcttaccttacaaatcagttcaggggtgtgggggagtctagagtagccaaggggtctaaagggagagttcagatgcggtaagagaagcctattgcttgggagggaccttggttagctgcatagagcagcccctggcatcactgcatccctggcttggattgtcattccagaatgctccttcatgccacctccaagtcagtccccacccctacatctcaaagtccttctgaattttccctaacacattggctttgtcttatctagaatttcccgtagaaccatataacttactccgatgtttgtttgttttttcctagttggagtagctgtgactctttaacctcataacatttactaaaccagacctgaggatgtagctcagttggcagagtgcttccctcctatgcacagaagtcctaggtttgggtcccataactacgtaaaacagcataagcgtgcatgtccgttaatctcagggagaagcagaagttcacatgtcaagttcaataccagtgtggcctactcaagaactcagttcaaaaaaaaaaaaattttttttttgttgttttgaatgggagcccgaatagcataatgaatgggggagggagtcaatttaatattcagatagtttaccgatttcacatgaagtgggtcagtcaccactttcagactagatagtcaccttgtagattttaaagcttacagtgatcctggccttcaggttgaaatataggtttaccttgcagtggaagttcccaaggaatcatagatggagtgaggattgcgctccagatttctagatcttgtctcacttcttctctctgaaagatcctcgagtaagaggaaatgagttcattagggcagattaacacagtagcaagcagtgtgaagatggcatgcaggggcttgcttgacagaagcttatgtcccacaatcctttgcaggtttaaacaggtactccattctgttgtcattcaggtgcccaggcaccctccctcctcagccccacaatccccacaggatgacagagcctggggaaggaagagtctggggggtggggcatgaaagcaaaccccctctgcccaggtcccctggccagaagcaggaccatagctgtagctagatgcagaggagtctagagacaatcctgcagagatggtttctcctggaaacagaggccttgccgccattcaccaagcctccggagtcttccgtttactctctggactctgctgcatagttcatggatctctgtttgagcccagtgataatgttagcacgaatttacgtgcaaggaagtgaacttgcagagcagaactagaaacccaggttacctgggtaagaggccaccactcaactactgactgtactacctagcttccagctagtccaccaaacattccgaaggtaaaaataccaatcaactcatttatactaggatgtaaggatccagttagctagacacagaagtagttttattttaacaactactaaagatgatgcttagttcaaaaataattttttttaaaatcgaagttatgccctttagttaccaggacagtgagcagagaaggttttggtggacaaaggggtctatttcagccactaaatcattgcaaatatgaagtatctacacaacttgaaagaccctgtcccagatgctggcctccagcatgaagccagggcctcccaaaggacatgtaaacatccttttgtgcaacagaacaaagagccaaaggggctagacatggaaaactggaatttccactctaaaaaatgcttggtaggggcaccacactgttgtatttgtagaagagtttctatctgatgacaaattttagatgttaacttgtatttaagtactgctggaagcctggcacgggctatgcctgtcacctagcttttcctttcagttctaaggcctctgccccggagtcctcctccttcagtccttcctgctgggctgcagtctctccttggccctctgtcctcttctgcacggtctctttactttagacattcctttgctggcttggcagtgacgttgggagaggccggtggacatgtcatcctcatatatcgagtgtgtaagcaacagccaggcctttgaaccctgggttccagttaaaaagtaacacactagatgctggatcaagaggagacaaatattagctttggaggcggagagcctcatcattgagaaatgtctgctgttggcaacaggaagagagcaatggtcacgccagagtgggggatccaggaacccccagattcctgcgaccttaggctagacactctattcttttatttaaaaaaaaaagtatttattttcaggtgtgggagggggacttgccacactggacatatggaggtcaatggacaacgtgtaggtgttagttctgtccctgtacaatgtgggtttggaccagcaggcttgacagcaagtaccttcaccagatgagccacctcttggcccagacactgtattctacaagttgaacattgaagcggccagtccttaagttccctcctagaactcccttaatctgagagccccaggactgtcctgtgaccactttgtgcctctgtcctttgtcacctcgatttggcgacccagttctgtcacttgtttgcagccaagctccgctgcctgctaggagcttccatacatcttcccactctcctgcctactgcctgagtcactggagatgtctaggaggacagcagagtagcaggtctccatggatcaaacccaacagctccagggatcaaacccaacagctcaacagcctcgggccccagagaccactcctaccatgcttctctgtggtttccaatgaccctccttatttaatatgccactctcaagcctctcctctcaaaatatacatgtgcccacaggttgtccttagtaggcttgctatctccccattgctctccttccctgctacctctctttccgtcacaggtccctggggactgtcacatctatctctagccccaacctctcttcagtctctcatctccaaaaccctaatagacactatcaacagacatctccaagtctctcaaactcaaaaatgtagccctgacctcacaccagaaactccatcaatggccttccatgcatctttgatccccaagtaagaagtatggcaaggtagggttccttcccgtgctttcgtcattcaccccacagttcccagaacatccggtgcttgggggcaccaggcaggcacgccagcaatgaaggagagtaagacaactcctttgtatctcatgtctgagtggaggcaaacaagtaacatgtaagtagatacaatgtatgtggtgttactaatgaagccaaggcagacagaggctgcaagtagtgtaagtagagtttagatcctatgacaaaacaagatggagacctggaagcagtggaaaaagccaactatgggtccactggagcatgaggttgaggagcaccctcagcaaaggccctaggtggaggcagagaaaactcaagttagctcagctagagcccacttagaaagggaaacccagaagtttgagtagggccaggccaggccttgcaggattttcatgtcataagcacataaatggtattaatgacttttaatttttcatatttaatgtttgggagacagaggcctgctgcatagcttagattgttctaaaacttacaatcctcctgcctcagtctttcaagttctgggatatcacgtataactacacacaatagcatagacagcattttaaacttctatgaggcagaagggggggggcggggagacaaagccagaggagtggccagagaggtagcagggaaagcagaaaagagtgcattctgggcactgaggcacaggcattcatcactggcaatggggagcatctgcgagttctgatggctggccagagagacaagagcttaagtggccacggtaactggcaacagggtggcccagtgaccttcacaggaacggcttggtcaggatgctgacagtaaacacctgatgaaagagatctctgcaagaaggggagaaggcactgggtcagcagggacttgtgcaacagctagcacaccctcgctccttctgtccccgcagccttcgacctcacattcttctgcacgctccacccaagtgtgacagtcacctgatgacagtgtctcactatctctctcctgattctctcctgtgcccagtttgcacacagttcccagtctagtcagaatctgccatccgcctgcccatacagagacttgccaatatccaccaggaaaaacccgaagcccttctcctccatcttcctacagaattcagaaggcaccatccggacttagcccatgccatggttccttcctgctttggctcgctctacaaactctccaaggaacggacttcccacgcatccaaaccaagttcctgtcatctcttcaatgtcactttatcctccagtcctttctgatgacccactaactgaagcgtcacacttctttggacttatagacctttgtcactttccacctgtagtctaattgtctcagccttacccgacaccaacagcagactagggg

SEQ ID NO: 100 - DNA, 3326 bp, Mus musculus
tgctgttgttaaggaaaacagaccaaccatctgcatctagaccagccttcctctccctcgctcccttttagaggaggttttcctgcctggaatctgcgacccatacgtgaagctgtccttgtatgtagctgatgagaatagagaacttgctctggttcaaaccaagacaattaaaaagacgctgaacccaaagtggaatgaagagttttattttagggtaaatccatctaatcacaggctcctatttgaagtatttgacgagaacagattgacacgagacgacttcctgggccaggtggacgtgcctcttagtcaccttccgacagaagatccaaccatggagagaccctatacatttaaggattttctcctgcgacctagaagtcataaatctcgagtcaaggggtttttgaggttgaaaatggcctacatgccgaaaaacggaggtcaggatgaagaaaacagcgagcagagggatgacatggagcatggatgggaagtggttgactccaacgactcagcttcccagcaccaggaggagctcccccctcctcccctgccgccaggatgggaagagaaagtggacaatttaggccgaacttactatgtcaaccacaacaacaggagtactcagtggcaccgacccagcttgatggatgtgtcctcggaatcagacaataacatcaggcagatcaaccaggaggctgcacaccgacgcttccgctctcggaggcacattagtgaagatttggagcctgaggcctctgaaggcggtggagaaggccctgagccttgggagaccatttcagaggaaatgaacatggcaggagattctctcagcctggctctgcccccaccgcctgcctccccagtgtcccggaccagcccccaggagctgtcggaagaagtgagccgaaggttgcagatcactccggactccaacggggaacagttcagttctctgattcagagagagccctcgtcaaggcttcggtcctgcagtgttaccgacacggttgctgagcaagctcaccttccaccgcccagcaccccaactaggcgagcccgttcgtcaactgtcacgggtggtgaggaatccacgccatcagtggcctatgtacataccacgccgggcctgccttcaggctgggaagaaagaaaggatgcaaagggacgcacatactatgtcaatcataacaatcgaaccacaacttggactcggccaatcatgcagcttgcagaagacggtgcctccggatcagccacaaacagtaacaaccacctagtcgaaccccagatccgccggccccgtagcctcagctcgccaacagtaactttatctgccccactggagggtgccaaggattcacccatccgccgtgccgtgaaagataccctttccaatccacagtcccctcagccatcaccttacaactcccccaaaccacaacacaaagtcacacagagcttcctgccaccaggctgggagatgaggatagcccccaacggccgacccttcttcattgaccataacacaaagactacaacctgggaagatccacggttgaaatttccagtacacatgcggtcaaaagcatctttaaaccccaatgacctgggccctcttcctcctggctgggaagagaggatccacttggatggccgcacgttttacattgaccataatagtaaaattacccagtgggaagatccaagactacagaacccagccatcactggtccggctgttccgtactccagagagtttaagcagaaatacgactactttaggaagaaattaaagaagcctgctgatattccaaacaggtttgaaatgaaacttcacagaaacaacatatttgaagagtcctatcggaggatcatgtctgtaaagagacctgacgtcctaaaggctaggctgtggattgagtttgaatcagagaaaggcctggactatgggggcgtggccagagaatggttcttcttactgtccaaagagatgtttaacccctactatggcctcttcgagtactctgccacggacaactacacacttcagatcaatcccaactcaggcctctgtaatgaagaccatttgtcctatttcaccttcattggaagagttgctggcctagcggtgtttcatgggaaactcttagatggattcttcattcgaccattctacaagatgatgctggggaagcagataacgctgaacgacatggagtccgtggacagcgagtactacaactctttgaagtggatcttagaaaacgaccccacggaacttgacctcatgttctgcatagacgaagagaactttgggcagacataccaagtggatctgaagcccaacgggtcagaaataatggtaaccaatgagaacaaacgagaatacattgacttagtcatccagtggagatttgtgaacagggtccagaagcaaatgaatgccttcttggagggatttacagaacttcttccaatcgacttgattaaaatttttgatgaaaatgagctggagttgctgatgtgcggccttggtgatgtcgacgtgaacgactggagacagcactctatttacaagaacggctactgccccaaccaccctgtcatccagtggttctggaaggccgtgctcctgatggatgctgagaagcgcatccggttactacagtttgtcacaggcacctccagagtacccatgaatggatttgccgaactctatggttccaatggtcctcagctgtttacaatagagcaatggggcagtcccgaaaaactacccagagctcatacatgctttaatcgccttgatttacctccatatgaaacctttgaagatttacgggagaaacttctcatggctgtggaaaacgctcaaggcttcgaaggtgtggattaaggaaggctccagcgtccggggcactgcccttccagcaagttccaagcgcacttttgcatttgccgagcagacttttgcagagccggtggcagaagcagtggcctggcccggctctggagcccagcttgtctgggccctgcccaagttccgccagggaacccagccccagctcaagtgccgccccctcaccgccaattctcaactggttgccgtgtacactgattacatttcaggaggacgtgttctatttatgttgtgcctctgcaggcaaagcccttaataaatattttgcatactttctaatgacaatgaatggaattaatcacgctacaggtatagtattacaactcatgtttactttttaaaatgatttagactgattttcagcttttatttcattacaattaaagatgtctcatgt

SEQ ID NO: 101 - protein, 946 aa, Mus musculus
TSLPLPRSLLEEVFLPGICDPYVKLSLYVADENRELALVQTKTIKKTLNPKWNEEFYFRVNPSNHRLLFEVFDENRLTRDDFLGQVDVPLSHLPTEDPTMERPYTFKDFLLRPRSHKSRVKGFLRLKMAYMPKNGGQDEENSEQRDDMEHGWEVVDSNDSASQHQEELPPPPLPPGWEEKVDNLGRTYYVNHNNRSTQWHRPSLMDVSSESDNNIRQINQEAAHRRFRSRRHEDLEPEASEGGGEGPEPWETISEEMNMAGDSLSLALPPPPDVSRTSPQELSEEVSRRLQITPDSNGEQFSSLIQREPSSRLRSCSVTDTVAEQAHLPPPSTPTRRARSSTVTGGEESTPSVAYVHTTPGLPSGWEERKDAKGRTYYVNHNNRTTTWWIMQLAEDGASGSATNSNNHLVEPQIRRPRSLSSPTVTLSAPLEGAKDSPIRRAVKDTLSNPQSPQPSPYNSPKPQHKVTQSFLPPGWEMRIAPNGRPFFIDHNTKTTTWEDPRLKFPVHMRSKASLNPNDLGPLPPGWEERIHLDGRTFYIDHNSKITQWEDPRLQNPAITGPAVPYSREFKQKYDYFRKKLKKPADIPNRFEMKLHRNNIFEESYRRIMSVKRPDVLKARLWIEFESEKGLDYGGVAREWFFLLSKEMFNPYYGLFEYSATDNYTLQINPNSGLCNEDHLSYFTFIGRVAGLAVFHGKLLDGFFIRPFYKMMLGKQITLNDMESVDSEYYNSLKWINDPTELDLMFCIDEENFGQTYQVDLKPNGSEIMVTNENKREYIDLVIQWRFVNRVQKQMNAFLEGFTELLPIDLIKIFDENELELLMCGLGDVDVNDWRQHSIYKNGYCPNHPVIQWFWKAVLLMDAEKRIRLLQFVTGTSRVPMNGFAELYGSNGPQLFTIEQWGSPEKLPRAHTCFNRLDLPPYETFEDLREKLLMAVENAQGFEGVD

SEQ ID NO: 102 - DNA, 272022 bp, Homo sapiens
  misc_feature (1)...(272022): n = A,T,C or G
agaccctcagatacatttctgtcagtaccctcagttacatattttgggagacgtaatacttaatgaaccaaaactctgttttgctggcagggaaaaaaattgggctgatacaatcaagataatcctatcaactttaggattattaggaatgttgataatcctatcaacattctatcaactctgtaatcagaaaaatatatttaaaataatgcgtgtttgttaaaaataaccaaacaaaatacagaaaaaagcaaagtaaaaattgacaatcccctaactccagtgttggtagttagggacagaagaagggtggaggatgtcttttgtctgtgttacatgattacagcaaaagtcactcttcattctggtagagccatagaaatctggccgagcagaggcagctgtgcctgaggagcctgacttcgaatcagctgtgttcatctttgctaacctcccaaagggaggaagctcaggaaaccaccgtagaaccccctaaaaggggagggtggctacagctgagcaggtgggggcaggcaggagtggagagaggcgaggatgatgagtcaggcaggtgagatggaggctttgtaggttatgttaaggctcctagacttagcatttcaagcagggatgtgacctgatcagatttatattttgcttgcattgctgatggacattggttcagtgctcattgtactggaagggtcaagaatagaggcagggacccaaatttagggggcttcccagggaatccaggggagaggtgttgtggcctggactagatttggaacatccagaaggggactggagcaatgacatacctatacctagtcccagagggccccgatctagctaaggacagagcgtgcagtcttgcagctgctgggctgatgacatgctggggagtgtatacctgggaaattctggtacagagataaaggaaatgctcaagcctccacctatgaatttgcccggtgattaaaatcatacttcctaagctttatagaagccctctgtttgtcccacaaagggccactagcacaaggaaatacataatgtgttcccttgtcattttataaaaatgtagactggtgctgcctgctgtgaaaatgccagtcaggttgcttccttcatagtaatcagtggattcttttgtccatttctgagtggaggattagccctctgtttgccccacaaagggccaccagcacgaggaaatacatagtgtgtccccttgtcattttataaaaatgtagactggtgctgcctgctgtgaaaatgccaatcaggttgcttcctttatagtaatgagtggattcttttgtccatttctgagtggaggattcctttccataacgtggtgtatttgcagtgtttctctcagaggaggagtgcctttctggtgtcatctgtcctgttggtggcagagttctgctgctgaattaaacctttgtgtcggccttggccactcttatggctctgctggaggtaaagccagtggagtggccttgtggcatttgctccaagttgttgctcatttttctgagattatcagaggccttagagggaagcattgaggatttcattatgctccgataactatcacgttgtcaataatatggttctgataagagtgatgggggatggtggggttttgtgagttgacagacgtgggtttgagacccagctctccagtcagaagccagcgccaggcctgtttctcttctctgagttttagtgtcctcaggtggaggggaggataatattaataacaccttcctgatgtggctccactgggctggccacgccatgggcacccagcacggggtggctgccctggttcgtgttaaccatcagcagggttggagagctccctccttactggtgttggaggtcattacctggcgggggatgtggtagataaagcaccttttattgtccctacacaaggcaactatggggtaacacaatataagttattcagattagagaaaatatgaactcttgctacagtgttactgcagacaggcacatatggtttgttaggatgacatttaaaaaaagtcattttgagttacagaataaaatcaaacaaaattcctttaatcaccagggctgggatggaaataaggcaaaatgttgattcctttgaaagacaatttttgggttttttttgttttttttaaaaaaactttatgtgttgatggtttactctggtctagtcgttcctactcctattctgaaagcaggccttgaattcctgattgtgtacaggattgtgtacaaacaatcaggaattcatcattcatatgaagaagttctgtttttccctctagtgtcatgaatattttcatgtacgtatatgttatgtgactagtgttaagaatgcatgtattatatatgtgcatgcgtctcatttacattgaatgtagctaaaaggaatatttgaaaagtataccttgcctgtctccaatttctacatttcaagttaaaaatgggaaataatcttagaatccatgcctgtggttcataagcctggctcagctcttgcattcccagctactgtctgacgaaactcacaggagctgtgaaaacaacgctgttttgtgaaagccaagtaggagcttagggtcatggcaaacttcagagaaatgtaaaggagcaggcactgtgggttttgtctaccccacccccccgaccccaccgccttccaaaatttctttctttttttttttttttttttttttgagacagagtctcgctctgtcacccaggctggagtgcagtggcgtgatctggggtcactgcaagctccacctcctgggttcacgccattctcctgcctcagcctcccgagtagctgggactacaggcacccgccaccacgcccggctaattttttttttattttttgtagagacgggatttcactgtgttagcccgtacggtctcgatcttttgacatcgtgatccacctgcctcgacctcccaaagtgctgggattacaggcgtgaaccacaccgcgcccagccccaaaatttctaattgaattttaaccttccacttttaagttctgatcctgatttataaaaacctatgtaattttcttcagctttcagaaggaatgtcttgtatcttcctatgggggtgttgggggaactgatattgacagaggtcctctgacatttgatagcctggcaaatagggtcaaacatgttccagacctcagaggattgctgaggatagctttctacttaagctagataaaagaagttttgggaatcttaccttgcactctgttttgtagaaacaactgtgtttaatatatttctcattactggctgaatgacctgtatgtgttcaggagatctctctatttaccattttaatgccacatatttaatgagcattcaggcccagactgtgaagactctggaaatgagaattttgtttcctatctcctgtgctgtaacaaaagcagcttaaaaattgcagtgtatagacctcaccttttatcatttttttttcagatttttaaatattaatattaagggtctttatctcagatgtttgttgtttaccaggtcatcagtatctggacgctggcagggtccttagcaatggagggagggagagggggtccagcctgcatgattggatcagtgttgaacctgtcccacctgtggggaagaggcagcatgcggagcagacaggtgcctgctgcaggtcaggagagctggccccaagtcctgacttggagggaaatggtacatattaatatcctttagtgccaggtactggcgtagctagtttatatgcatcacttgagcccccttgcatcactggcatcacttcaagatagacaacaaggggaatgcacatcatatccctgttcactggcgttcactggtagggaaactgaggcttaataatgtgcccaggtacacacagctgataagtaaccctgcaccctcgatctcacagcatgacattggaatccacctcattagacagagctcagctgcctattctgtcaaaaatgttgagttgtatcagctgcagtgtctgtagtattcctagacatttctgtgattctcataagtatctttgaaagggggccatttagtttatttctgcatttctcccttatctgccgaaatgcccgcaggctctgggacaagctgtaaagctctccgtgttatgctgtgttgcaaacccagtgccagtaatgatgcagtgctatttaaagataagaaagcaagctcacagagggagagcgcagcaggatgtttatgttccagaagcataaacacatgacctgtgcccgtcccgtgttcttcgtccatgtccccagagaggccgtggatgggatggtgcaagaaacccatcaggaagcagaattaatccttcctgcgggtggtccctgtgaagaagacacagcggccggtggtgtgacagcccacagctgtcgaaggaagggagaagagagggaccgagggccagcaatagggttttacagctacgtgctaggttgtctcacatctaggaaagagaatgttcatattatatagaaatgggcattttccctgtggcctgatatgaggtatccagaatattcctttaggtattattaagtcataggtttctgttttgatagaaacagcaggtggttcagttagtatttttgttgttgtaatagtagcttagatctcttgtttttgttttctttggccaagacagaaaacattctgccacacacattacttcatgactctggttatatattgagagcagcattaaaaaaaaaaaaaagtccaatttagtccattaggccattcttgcattggtataaagaaacacctgagactaggtaatttataaagaaaagaagtttaattggttcttggctctgcacgctgtactggatgatacaggatgcatgatgctgacatctgctcggctactggggaggcctcaggaagcttctaatcatggtggaagatgaagggggagcaggcatctcacgtggccagagcaggagcaaggggttgggtcacacacttttaaacaaccagatctcatgagaactcaccattgccagaacagcaccaagccatgagggatccacccccatgacccaaacacttcccaccaagccccacctccaacaccggggattattgtcaacatgagatttcggggacaaacatccacactatgtcgtagccttaaggggatcttacctctttgaagcattgtagagttcagagagtaggacattttgtctactgtattttaaaatactaaatgttctgattatgaaagtcagtcctggaaaaaaaaaacaaacaaacctgaaaccatagatgaagataaggaacaaaataaaaattacccacagtctccctcgcgtgtaccgcacagttcatgttttagtgtgtctacacaccatttaatgcaggtggacagactcaggggcaggtgtgccttgctactgctatgtccacagcacctggcagagtccctggtacagcataactgctcagcagttgggtgctgagtaaatattaatacatgtgcatgtggtaccagtcagggcccaacagagggacctcatgcgaggagttgctccacaggtgtggaggatgaaagaacaagttggggcgaccctgagagagcccagagacaagctctgcaggaagcaggcaccaccactgggccaggtgacctgagcccaggagccaagaggatgccctccactgctgatactacctctgcagtgggacgacatcggaccccactgccgatgctgggacggtgcttcccctccccctgaggctctcctaccagggccccctctcatcaggccccagctggaagccaactggaaagggagtcggggaagtttcatttgtgggggtccaagtgccaagggacagacaagggaagggtggatttgcagctaagaagatagtaaataaccagactacgtgacagtctgaagaatcaaatctggaatcaaattctactctgctctaatgtaaccctgtattttactgtgaataatataccgtgggtatcttccttgcttgatagatacagctccacataatttttctcaatgaaacagattctggagtaggcaacgttttcctcttttgtaaaatacaccaaattgtgaggattgaatgagataatgtcaaagtattagtactttaccctagctgattgacagtatccagtgatagtgataataagggtaattactactctagccaattttatcaaacctatggatgtttaaggaattgggttttttttttttctcctttgatgaatactcctgtaaatacatcgttgcctgcttgtctgagtctttctgtgggtttttagaagtggattacttgcagcaaagtctcctctacttaaggctctttgtatattttgcctaattgtgctctagaaatacatcaatttccagtcctccttctctcagaccacctgtccctcacattttcaccagttctgggtcttgttattctttttactctttgtcagtcaggtgattgaaaaatgtacatttttttaaaattggcatttattagtgagcttgaggatgtttttcacagtcatatggaaacagttctgcttcatgaacaagaccttggggccacatactggcttgttcacctggatgcattttctcagtctccctcagaatcatttttctccctgaaaaatgggattaaaagtattaatagtagtgcccatctcacagagtcattgcgaggattaaagagaggatgcatagacgtattgaatcagtgctgggttctggtagatgttcagctagccctagagattattagccatttgatgtgctgatcctcaggaaggtgggcgggagagacctagacgcagaaaaggagctctggagttgaggtttctagagatgaggtggtgcgtggtggcccagtccagcatggctctgggtgtgagcacaacataggcagatgtgtctggggctcagggagtcatttgtggattgagggtgctatgtgggtgtggaccacggtgatccaggatgatgcaggatttgggccggggaggaagatggcaacccaggttccatgccatctttaaagaggggatggttactagggtgtccagcgaccagccaagtggcctatagataataaggaggactcttcatgacatggaggctgaggtggaaagtcccagagtagggttcagccctggccctaaaaagtgccggagaacctgtagcctcctggaagctgtgctgtgtgcagagccaagcttcagtgtgacaaggaatggtgggagcaatttggagaagaatgaagacttggtgcagtggctagggaggcaggcagggtgaggatgtggaagggtgcagagctgctcaaggtcagcttcctgagcctgcggtgtggtcccttgctccacactcagaagggccctgtgtttgatttaatgctcttttcttgccatcttgaaattcttgatagtttttgaacaagggatccatgttttcattttgcgctgggcctggaaattacgttgctggtgctgaggggatgtgcagagcagaggtgggcagagaactgacgagaaggacacgtgggtaagggtgggatgagctggcctcaggactccgagcagagctcatgtaaaggtgtcgggcccaggatgcgttctcaggctggggtgggaggcctgatgatggcagatttctctggattacaaatagaatatgtagcagggtggttcatagctttgtgtgtctgtgtgtgcattggtaaatttttattttgaaactaaaattatttcaaaattagagaaaggctgtgagagtgcggttgagctggtgttggctctggaacagggtttcccaatgcaggcggcactggtaactatgtgccttgggtcattctttgttgtgggggctgtcctgtgccccatgggatgttccctgcacccctggcctctgccttctagatgctggggggcactttccctggtgtaatattaaaaaaaactctccacgttgccacatttggggggcagaatcaccccctccccgaattgagaagctatgttattggaacacagtgtcctgtattttgtctagcctctgctgcttagagctgcctgagcttggagaagatacttgttctctttccaaagcttcactgtccctttctgtacattgtcaggacggctgttaataccactgctctaaatgtgctcagttttgcataaacatcagctaatgttaaaattttaatctctgctaatataagaggcatcgaagtacacgcgagttcagtttgcatatggtgaggagggagacggcctcatatcgtatgtgtgtatttgccgattctatattttgaggttgattcctgttgtcttttgttcagttgtctcattctgttttcttttggggctttgaatgcccttttcatgcctgtgacctctctttactatgccttttcttctctgccagcaaatctcatccattcttccagggcaccttactgtcccccaaagccccagtgactgctctgtccacagggcttggtttctgtgctctggctctgcaatgcaatgcagaaggggctgggctcggaatggggttgctggtcaggccatgtgcccaggggaaggacacaggactcaaggagtccacccctctctcccccccttttttttttggtcactgaaatattttctttccaattctactagtcctgctagagctgccataacaaaatacccaattggtgacttcaacaacagaaattgattccacactgttcttttttttttttttctttttgagatggagtcttgctctgtctcccaggcaggaatgcagtggtgtgatcttggctcactgcaacctctgtttcccaggtttgagcagttctcctgcctcagcctcccgagtagctgggactacaggcacatgcactgtgtctggctactttttatattttttagtagagatggggtttcaccatgttggtcaggccggtctcgaactcctgacctcaagttatctgcctgcctcagcctcccaaagtgctgggattacagacgtgagccacttcgcctggccatgatcccgcacagttctgaaggccagaagccaagatcaggagaccagtggattgtttctcccgaggcctctgttcttggcttgcaggtggccccttgctgtgccctcacatggcctttgccctgcgtacatccgaagccccagtgtctctctgtgtgtccaaatttcctcttcttagaaggatgccggtcatattggattagggcccacccgtgtgacctcattttaccttaataacctctttcaagtttctgtctccaaatacagtcacattccaggggctagagcctcaacatggaagttttggagggagacacacttctacccataacaccaatgtcatattaagctttatggaagaatagaccaatatgtggtgggttcaagaatcttttcttagaagaaaagtgaatctgtatatttgatactttatgatttccttatttgctctaagcagttggtaagaatctcagtgtcacttggctgaatgatacactactggtgcctccagacctatgaggagcctaatatttttgtcttggttgaaacaatgcaaatcctgggttttggagatgctcacagccagctgtctgattacgtaaactgaaagtggcagagaggaagcttttgcgtggggaaaacatgaaatatacaagggttcctttaaaacagagtgtacttctgaacatttactgaaggtggagggccctggacacctgatgttatcttatgtggcgttatctgggtcagatttcattgcatttcctgaagaggtaacttggcagtcctgggagaggctggaccttggtgtccaggtggcaggttcataagacacctgtgatttgatgtgagccagtcacagaggaagccatttccagagaggaacaaccgtgtagactgctttcctgggagtcaagttaaaacttctctcctgtgaccttgtcacccggcagtggaaagttacccttggctgcagccacgacttccgcatactcttcagaacttgctctgcccttgagttttccagctttcctttaatgcactaaacctttaatattgtattctcctaaatgagacgtctcgcatttgagcaggtaacactcggtaagactttgcttggtgggggaggaggttttaccttcctgtggcattctgaagctctccacatccacccatagtcatgattgtgttatatgacctcaagatgctggagctgttaattcatctttaacataattgacctgattacttctttcttgaaggattttgttcaaacctcagggtttatttaggaacaagtctaaccaggcctgattggttttcctaagtggagatacagctttgggaaacaaattaagaaaatgaatggattgaaaatgtaggaacaccgtgacagttgtgaatttttcttattgagggaaaaaatgggtatctgtgaatatttctcttacactatatagtgagaaatgacactctgctgtggatggtaatttatttctgtgtaattgcctgagtaaggctttctctgatattgaatactgagtagaactcttaggttatttttggaagaattatggattttctcttaggttttagaatattttttgtttgcctgttaagagaatttgatgaagatttcaatgtaattaaccaaataaaatggcattctgtatcctgggaagggacgatgtctttcagttctaaatcaatgcatcatttacctcctatctctcttgctggccgagccatcaatcctgtttttattaaatgttgttgttattgttttgagacggagtttcactcttgttgcctaggctggagtgcaatggcataatctcggcccactgcaacctccgcctcctgggttcaagcaattctcctgcctcagcctcctgagtagctgggactacaggcatgcgccaccacacctgactaattttagtagttacagggtttctccatgttggtcaggctggtctcgagctcccgacctcaggtgatccgcctgccttggcctcccaaagtgctgggattacaggcgtgagccactgcacccggccgttttttgataaattttaaacttctggtttgaaacttttgtttcctgtgcttaaaaggagacagttaaaagcactctgatttggactgacagaatgttttttagatgttagatagatctagctttgaatatttatttgcagagaagtagcagggaggactaggaatgactttttcttaggaggtgctatgcattccatcaggtgactgacccctttgtgagctgtagtggtcagtcccagcatggcccacacttgttggctgtcttagccatggtggctgtggttggcgggtacccagccaagggttttccatactgggggccttggtccagtgggggcgggtcgtaccatgacccccttctcctgtgatcttgcctcactggcccaggtaaattggtggacgtccttgactcctccacctccaaaaggactttgaactttggcactgttgggagtttaggctacacctcaaccaggcagagattgggatctaacctacttttaaaagccctctacagggaatttcataactttcctgagtgttaggttttggtgattaacagccttgactttttggagcccttcctttgccaaacatgcattcctcaggtgctcacttaaaatgattcttcacaatatgcctatagacgggtctgtctggtacagcatcctggagtggtgtcaagggaaagaaacatgctgcttctgccacagacggaccatgcatgggaagaaactatttgagaatggctctccaaggggctggtcggccttgtctgcccactccctctacctttctttgttctgtttctttctcttcagtgttggtccattttccttttttcactgttgcgtgttagcacatcattactcttatctccatatatttggatgtttcctgcattatggtgagcttcagtaggtcttggatgagttagttgttctcattccaaaatgtaaatttctggtgtttagtaggtgctcagtaaagcttgagaaagatgaaagtgagagcccagaactagtataaaaatacggataccaccatagcatggtaattaaaggggtgattgtgaagatgaggtagctgtgcctggatatgtgtgtgtgtgtgtgtgtgtgtgtgtgtgtgtgtgtgtgttggctggagaaggcttaccagtggtgctggacatgtcgggtagagtgttaatagtaacttaattgactgaatttggaaataatctatggggttagagagcaaggaggtagctgtgtaagaggatggggtcggtgaggtggggtggtgtgagcaatggagctcaagggctcaaggtgcaggcctggactgatggccactaggaccaccccaatggcttcagggtcaggacaggaagggaatgtgattattgcagcaggtagtagggcagtatgagtgtattattcatatatgtgtgatgaaatggagcatcaaataatatatcccataggatagaaaggcacagtgagtgagtttgggttaaaaattcgatgagataaagtggttgtacctcctatgaaaacaatttaatttcttattatgaaggcattactcatgttcttcagaaaaattaaaaaaaaaaactcagtcattatagacaattgtactcaagatgaaaacaccctgtactgtcgcaaccctgaagcacctctgttaatatgtgtgtgtcttctcacggggtgattcttgatcagagttactgaaacagcaaggcttgggaacaagaggcatgagagcaacactcaggacctgttcagttttctgcacagttccaggtgctcttccagcattgctggctccgagagagtcaaatattcagagcttgcaagctggggaggaaaggggttagggtggagataaagatctgggagatctacagatacggatcatctgcatttggaaattttgtttgcccttctcacacatttccatccaagttttctttggggaagaggggatccctgcagaggagtccagttgcaaatgtgaaatcttaaaaatgtatgtaaatagcatctttcattccgtgatacttgtttgtttgaatagaacattgttaaattttattgtgcttcagaatcatctgggtgcttacaaacatagattgctggactctggttctggagattcggattctggaagtctgaagtggggcttgggaatctccatttcttccaagttgccaggtgatgctgatgctggtagtcgggagtccgtactttgagaaccactcttctacctaccaagacttccaaaaaattggtactctgggaagatgccctgtgccagtcctgtggcttcttaggcacgtcttccagcatagactcctgcagagaacctggtacctgcaagtacctagtacctgcaagtacctgcaagtccagtgtgggaaatctcatgacaggcatcaacattccgtgacggttgacagccacctatggggtggctgatgccttttctgtgtcttcagggttttaggggaaggagagtctaaatgagtggttctaggttgtgggaagagcctggctttgatgttcagacacctggcctcaggctgcatcgcccatacttcctgtggaatggttatcatgagtcctgttgtcctgtaggtgaatcattgattcctgtctttgcataacctctcacttgatgataatttttttttaaaaaaatgactcttggaaacagaacacacagtttgtagagggacctacagtacagcagaagctttgtggaaggatacaaaatgtgagggactgtagtcgaagagatttaaattggaagtgggaagagattgacttttttttttttttttttttttaaagacagagtcttgccctgtggtccaggctagagtgcagtggcacaatcttggctcactgcaacctccgcctcccaggttccagcggttctcctgcctcagcctcccgagtagctgggattacatgcatgagccaccaggcccagctaatttttctatttttagtagatatggggtttcaccatgttggccaggctggtctcgcaaactcctgacttcaggtgatctgctttgtgtctcttagggagcatgtttgaagagtcaaaggaaaaccaagtctgttagctttgcgaaacgtttttttttttgagatggagtctcgctctgtcccccaggctggagtgccgtggcgcaatctcggctcactgcaagctctgcctcgtgggttcacgctgttctcctgactcagcctcctgagtagctgggagtacaggcgcccgccaccacgcctggcaagtttttctggaatttttagtagagacggggtttcaccatgttagccaggatggtctctatctcctgaccttgtgatctgccctacttggcctccaaaatgctgggattacaggcgtgagtcaccgcacccggcccgaaatattgttaaaaccaagtacctttgtgaaacattgttacaaaaaccaagtaccaagtgtgtggcattaaagtcaaacattaatttcaagttacagaaagaaatagcactgagtagaggttgatcgataaaaaatgaataaaatattcaacagaaactccttaaaaataatgtgagaaatggacatgtgacatgggcgtttaaaaagtctgtaaggccaagaaaagtttcctgaaaggaacactgtgcccaggcagtcctggctttgcaggattccctgataaccgagctcaggcatcctgcagagtgagtactgcccagatagaaccttctgcctctttggggtaaaattcgatttcaaagagagagaactgtggggtgagaaaggaagactgggacccaaggggccaaactagtgacaatgactgctgtcatgaagggtgacaaggacaatacctgctgagctcaaaccaccctttggacccagtgaagctcagatgttgcttccagtgcaggagtagttaagctcaactgttttacaatatccagttatttggctgggtgtgatggctcacacccacactcctagcactttgggaggccaaggtgggtggattgcctgagctcaggagttcgagaccagcctgggcaacatggcaaaaccccatctctactaaaaatacaaaaaattagccagacgtgatggcaggcgcctgtaatcccagctacttgggaggctgaggcacgagaatcgcttgaacccagggaggcggaggttgtagtgatccaagatcatgccgttgcactccagcctgagtgacaagagtgagacttcgtctctaaataaataaataagtagcaaaaacaatccagttattcctcaaatatttatgagcacctcttaatgtttcagatactattgtgacaagagaaaaatgtgtttgtatatgtaaatagaaaaacaaaagtgatgtggaagcgattacttctgtcattttggaactaccttcctcccatattaagtccatattatgacaattcaaaaataatcaaacttcgtaagatattacctgtgaaaggaataagtatttaaaaatgtattttagatggccttttagaaatctagtccatggacacaatctagcatcatgcagttgccttcaaaaagaatatcctaaagttcttgtttgttttctttttcctttcaaagtgttctgttgaaaataacccatttgtcattttagttttgatatgacttagttatacatgccttttgaagcagtacccacccacatagtaattgcgactatcttgtgttttgaaaaaaaaaaaagcgagacaatttgactttgatagttttaagtttaaaaaaaaaaaaaaacgctccaagttagactcagatgaaatcctttgatcttaggtattttatgaggaaactggaaaaaataatttcacaaatttctattttgctttataaaaattttatgattcataacacagggaaaatccagtaagctaaggcgttttttagttgtttatcttgctagtgagtctttgatgtgagttatttctttgcagtaaggtggcatggatgggtgatgaggctaagctgaaaagttaaatctcataatggacatttgcaccctttaaggaagtaaagctctcaaagcatgattatggccaagatgaggccggtggcatgtttgtctcctaaatgtgcagccaggaatctcgacggtttgtctgaggtatgcaggtgcctggtagataaattagggtgagcatcattcatggcgtgtggtcagttgcaggccttcagccacagggatgacagaagggaagtgaggaatcagggatgggtttgaactgcggcgttgctttgggagtctctagacatgatcagttgcacatggactgttctccttgtcaccctcaggatctactgtcctgtggttgaagcctgcagctctcccaagttggtggcactgggcttcctgacttctcgatgtctaatgagacagtggaattctacttgcagccccactgcaggccaggtttatctctcctctgtcttcccagctggtgatttggtttctcagtgctgttttgggtgcacttttgtggaggattcaagctggtccttagccactccttgaaccagaacctcttttactttcttatgtagttcttctcttcctgtttttatatcctaaaactagtccagcgaccagcccatcgtagtagaagcgttggtgttcttcctaaaaggaattgtaaacatctcttggagagtgggttagccaccataaattgttttgggacttcggatacccccttccgcaaatgctatctagagatgctttaatttcatttcaattggttattgcatccctgatattttgaaactgttatgagtagaaaacattctggtttatgaacaatctgcttttcactatgaaatagatgggaattgtaattattcctgcgctttgtcttagagaagttacatgcatgcatcaagtgttgtgtgatcttgtgcagttcttcttagattgagtttttggctcctcgtgtgcaggccttctaaaatcacaatgtccctgagttgggaaggaacatcaggggctatctggttcattatcctaccccccaccgcctcccacgccccacatttctggcagcctacgagtctttggtccctccccagtgctacctggccagctctcagccttgggaggccacctgcccgtgtttgacctgggttaatgaccgccagttcctttcccttaatacaactcatctgctctcctgcatgctcgctccttgggtgagagctgccctctgcaacctcataacggaaaatggcttgacttctgccacctcctcctccttcccatgaaagaatctggtcttttctatctctctattatttttaaaaccagattaggttggttgtggtggctcacacctgtaaaaatcccagcaccttgggaggcagaggtgggcagatctcttgagccccaggagtttgagaccaacttgggcaacatggggaaatctctaccaaaaaaatacaggaaaaaaaaaaaaatagctgggtatggtagcacacacctgtagtcccagctacttgggaggctaaggtgggaggattgcttgagcctgggaggtcaaagctgcagtgagccttaatcactccagtgcactccagccggggcaacagctagaccttgtctcaaaaaaaaaaaaaaaaagaaaaataagaaaaagaaaccagattaaacattcctaagtaattctttttgtgacttttgcctgtttattaactatcctggctacttaaaatgaatttttgagttatgaatacatttagatggttttaaattcaaagaagtctcttttttctcagtcacttccatccccagccaaacagttcttatccccagagtcagccagtgttaccagtttcttgtgtccatgcagtttgctttatgcatttacgtaagcaaatattcgtacacacacacacaccctttctatcttatggaaagttatttcagtggcacatgtaagtatctcagcatctcttgattgtcattctttttggattttttttttaaatttcatacttacaaatgatcatgtatcttaagttttctgaagtagccttggtttcgcattttgactgtatttattatggtatcaggttccatatttcttaaaagtaatactgctgctgcacttacattgaacaagtcaccaagctctgttaattttgcctgaaaaatgccactgctttgacatgatagaaaacacaggcaatagtctttatttctcactgctgtttttttcttattttgaagaatcaccctaatacataggaaaatctcgacttagcaaagagataaatgagactgtaattattgcattgggtttttcacaatgtatgttagttatctattgctacataacaaattagttttagagttagcagcttataaagcaacagatatttattatctcacagtttctgtgggtcagtaaatcaaaagtggcttaactgggtggttctgacatgtgcctttccacagtgactggtatgtagcaggcaagggtctcttatgatcctgagtgaggatgtcagccaaggctgctgtcatctgaaggcttgactggaacagaaggacccatttctaaaatgagtcactcacatggctggaggcaagaggcctcagttccttatcgcagagattgctccttggggctgactgagtgtctgcacatcatagcaacagctggctttccccagagggaatgatccaaaagagaggtggaagcctaatgtctttgtgacctaatctccaaagtcacacactgtcacctcttccatattctattagaaaggagtcactaaatcagatacccatgggaaattacccacctcatgaagaaagaaatatcgagaatttgtggacctgtttcacaaccacacagcatcattttttgaaggtagagtcaccttgagcatttaaattagggttctgctctagaagtctatccctttattttttcccatttgttaaccctttttctacttggcataatagcagccattacccagtagaagttgagagatttaggttgcacagaatcccacagtcttttcagaaactcatatccttagggtgtctgcttgttgacagcattgtagaattgaaacttgaccacgtgttatgtgttgggctgccagtggtgatcagagatgacggtgagtagtccgttgagttagggctgtttgcctctgtcggtgtcatctgggtttgaactggacttgcagtcctggtgggctgctttcatttccaccctgggtctttgttctcaccactcacatcttacgcctctgttccaccgctgtgtaagaggcaactgtgcacacaccttgcctctgccattgactgtaagctcctgagagagagagagaatgtgtctggttcagttttgtggccctcctttttgctagcataatgcattgaacatagtatcattctgcatttttgttgagtgtataattagatggtcaatgtggagaactcagagggattttaggagggggtggcagcaatataaggttgtgggacccaacattaagagagggaaaggtgtagcgggaaggcgttggtgtggggagggagaaagtcaagaggattcaacctggcaagagttggaagtgacaggaaggtgtgtggggtggggacgcaataggacagtgtgtgagattttttaaaaaatgcaggcaggggagggatgagtaggcagagcaccgaggatttttaggacagtggaaatgctctgtatgatactataatgggggatacatgtcattatacatttgtccaaactcaaggagtgtacaacaccaagagtgagccctaaggtaaacgatgggcttcgggtgatttcgatgtgtgaattgtaacagggatactactctggagcaggatgttgatcatgggggaggctgtgagtgtgtcgcggtagggggtacgtaggaaatctccgtgccttctgctcaattttgctgtgaccctaaaactgctctaaaaagagtagtcttaaaaatgcatgaaataggatcctgtctcaggactggggcaagagcaggtagaaatggaaagagtgactgtggctgctgtgtagcaggcacacaatggtcatggtccatatgctggcttagttattttttaaagcaactaaagttaagtaatgtatacgtaacttacatatttatgtggtccaaaaaacgttggtcatctgttttaatgcagagagtgtttaccctaagcctgcaaatgtgatgggtaatagctagaactagaaaagtactttagaatatggaaggtaaatacatgaattaatttaggtaagagtgacaaaacagtggaagtccctgacttagaacttattgtccgcttggacagctggtgtacgtgatcctggggtcacagtggctccctgtgcaggaagaacactatttcccagctcagataccatctttttaggagagtacctgccattgtggaaaataaggataaaggataacaagttacctccttaagacaaagtcataggagaaatggtaaattccagtatcttgagttttgagttggaacttgaaatttattttactacaagaacactgttgatggattatgtattttatagactttgtgggtggctatgggactctagtaactgcttatgcacagtttatatgagtagggctgctggatttccagatgacgctctcgcaactgaaccttcagattaccacctgtttctcagtttggacactattagtgtgctgctgtcacttatggctcgggcaccttatcttgttttatgtcttgatgaagaagtacaaaattcagtgtaaaagaaaaacatatgtaaagcttatagaatcaccccgttacacaataacaatgcagaacaatagattaataacaggaagagatgctgaaacttctcttcagcctagtttctactctgatgtttcttctctgcattgtacagccaatctatgaataatattttcattgtctaagcaaagccaccttagctaaatatttaattctactggagtcataaacagggttcaaaatatcacacatagattttatgaaagtaataaaatgcttcagaaagtacagtggctcagcctggggccactgcatctgataatttggttacacaccttgtcatgtgcttcctaaaagaatgacgatggttgcttatctgtgtttaagcttgtcattttgaggaaacaaagataagacatttttgctgtgtctctaaaatgcatgtgtaaactatttttatagagtaatgcttcagagaggagtaaaatttcctgcaacaggtgcttgtaaacagtaattgctcagtaaaggtcacctcccagctgttgcctacatgttacataagagaaccccttcacgtcttccgtatttgcagctctgtacctttgtgagtcacctaaaaaataactcatagggttgtttttctttctttcttttttttttctttgagacagggtctcactctgtcgcccaggctggagtgcagtggtgcaatcccggctcactgcaacctccgcctcctgggttcaagcgattctcctgcctccattctcctgcctcagcctcctgagtagctgggactactggcatgcatcagcacgtccagctagttttatatttttagtagagacagggttttcaccatgttggtcaggctggtcttgaactcctgacctcaagtgatccacccatcttggcctcccaaagtgctgggattacaggcatgagccaccgtacccggcaggtttgtttttcttatgacaaaatcaagcctggatggtgtcgttaacggtgaagttaaaatttttcttttgctttccttaatatttccgtgtttttttctttttctttttttttttttttaacaaaagtctggtttctaaaccaaaatatttaatgcttcaaaaggaaaaaaatgtaagtcagtccaaagaaatgattcattttgcagaggtaattactactaacatcaacctttccaggtctttttctatgcagctatatcattgacatttttttaaaaatgagattacattgtactggagggtagactgctataacaacttttggttttggatgggaataaacagaaaaagtctcatctccagttcatttctggggagggtcaggaggtggggggtgcttggctctactcccttcgtatgattttcccttctttatctccaggatcttccccatttcacggagagacatggatgagaatgaaggctgctgagtgggaggggcttatggggccagttttgaagaggcctcataccttttggccacattccattggccagaactttgtcatatgactgcacctaactacaaggaagactgggaaatgtagtcaagttgcatgtccgggtagaaaagggacacttttctgtggaatagctagcatgtttgtaactcaattttataaaccattttgaaacttttcttaaaaaaagcttatttcagacacatttttatatgctggatctgctcacctctccatctctatcttattaaaagttcttgccagaatctctctccaattgttctccctccttctgccctgttccctcacagcagccacagtggttctttcaaagactgaagctacattttatcactcgcctgcttaaaactttacagtgcttctcccccagtggtcgggataatgttcaccctctcctgaagctggcctctgtggtccttgaccccatcaggtcccacggtgccctgcatggactctgccatccttcaccagcttccccccatcaaacggggcttgctgtcagctcttcctgcaactcccagccctgccgcaccactcagccttcttccttcaggcttcagctccagtgtcttttcgccaaagaagcctttcctgatctctcagccataaatgttcctctccccagttgctttttccctctccctctactcagttgctttatttaactgtcatattgtctttggagcacttgccaccatcagaaattatcttgcattatgtatttatagtctgtcttccgcctactagatggtgggttgcttgaggcaggaactctgtcttgtttacatctctatctccagataacgtgtctggcacgtgatgggtactcagtaaatacttgtggaataaagaaatgtcattacaggttctctatgcattaaaattttttagaaatggggtgttgcagccgggcgcagtggctcacgcctgtaatcccagcactttgggagactgaggctggtgtatcacctgaggtcaggagttcaagaccagcctgggcaacatggtgaaaccccatctctactaaaaattcaaaaattagctgggcatggtggcacacacctgtaatctcagctacttgggaggctgacgcagaagaatcacttgaacctgggaggcagaggttgcagtgagctgagatcccgccactgcactccaccttgggtgatagagtaagactctgtctcaaaaaaaagaaaaaaaaaaaagaaatggggtgttgctatgttgcccaggctagagtgcagtagctttccacaggcttgatcgtagcgcactgcagccttgagctcctggactcaagtgatcctcctgcttcagcacctccccgagtaagtggtactataggtacttcaggttttgaagcatgtgtaaaaaatactctagcagggacatcatttgagctgagcaggccatggaggcatcaaatgattagcagtagggtacaacttgttgtgagaaccagaaaagagccttggcctacataacatcctgtgctaaagaaagaaccctgactcccagcctgtgagtgttccagagatgggcagagcagtccctgcagcgcttcagggaacagggaagagcagctaacccctgatgcttctgtaagcactttgggacgccctttgctatagtagggtattgtcttagttatccctgacttgcctggtgttactttacatcccttaatcctttcatgaagactggcaaacacattcagtcctgccaaccttgaaagtaggccatgtttgaaagaacattggcacaaacgagttgcgaacatcttctttaccatattcatgttctttaccgtattatgaggacactgtgcttgccacatgggcagtcttgttttggggatacgtggttggatggacggttgggtggatggaagactcctggaatgtgaagtatctcaaggatgtgtgtccattgcatgaatgtatgtttgatctatgcagctaattgacaaagatccaccatcctgtaccctccatgttttatttttgccctgccattgttctcttcgacattctataatcatcaaggttttcttgccctcacctaggtcttgactaaacatgttgggtaaatgaatttcatattactactttcttgcgccgtcagccattgtgttcttggggactccatcctgagccttttttttttttttgagaccgagtctcaaaaacagtgaaggcaggtgactggtgaggagagttccagccactggattctccctcagtcccctgtgctgtggcccttggtgacccctagatttcagtgcccctgcctgacactggagtccctctgtaaagaagcccctttctagctagctagctgttccatcccgcacacccccacagaagccttttgctgccattagtaagcacgcctctattttctcacctgtgattgatcatgcatgattgagttttgtctattaaagcaattgataagttactaaaatggcaccaaaagaaattagaaaaaaattgttgcaaatgtcagtgaaatcttttaaaaaactgttgtactttagaagtgcctcaagtgactaatggaggcttaggactctgagtggtgtcacaaggaaccttatgcacagggacactgacattagcctgtactgtcacccaggctggagtgcagtggtgtgatcttggctcactgaaagccccacctcccaggttcagcaattctcctgcctcagcctcctgagtagctgggattataggcacatgccaccatgtctggctaaattttgtatttttagtagagacagggtttcaccatgttggccaggctggtctcgaactcctgtcctcgtgatccgcctgcctcggcctcccaaagtgctgggattacaggcataagccaccatgcctggcccctgggccattttttattcttactcttaggctaggtttctgcagaccttggttataactgcaggctctacattgataactgctgagtctctaagtcagaccagacgtttctccccatttagtgatacatgttttccatccaattgcttcatagacaccttggacacagtgctctatttcaatttatgttgacagttcatgacccaaactggaaacctgagttatcctggacttctgcctaccaccttctcctaagccatctcacctgtcctaaatgtcgtagcccttatctagttctctaagctgtcatagggtcctgtactgctgggctgcttgttgccttcaatagagcctggagcatattcatgtcggtatttcaaggccccgggcataagagcttcttaggaaatattggaatgaatgaagaaatgatgaataaatgaacaaatgaacagttgattgatttccaagacactttggggtggtttccatttagaatggtttttatttctttttactggaactaaggaattatttttgcttgttgatgccaacattttaaaagcactataattttgaaatgttttaccacattaaattcttttctattgcaggtcacatacaaatatgtcaacttcaaaggaggaattatttgttatatttatgcaaacttgtggcacttggacatttatctagatggttttttgtgtatgattgtgttcttggtacagctggaaaagctaactttaagtggcaggagtaattgatcttaatgacttactttgaattaaacttgtgcttaattaacttggatgttctaagtttctagagtcacagacttttagagctggaatattgctttttgaacttcagtgtaaggaagaattgcttatgcttgaattgatttgttctgtatcccaatactggactgagtagaaatcaattactttaatattggatgagagagtgattgattgaagatcaggtttttaacctctttttttgttctccttctcacagggagagtcccgtattctcagagtaaaagttgtttctggaattgatctcgccaaaaaggacatctttggagccaggtatgttggctttgtttttatttctgtggacttctgaaaaattgacaagcagttttcaaattcaggcacgcatcagaatcacctggaggacttcttaagacaaagctggctgggccccacctgcagggattctgatttaggaagtgatgctggcccagctggttccaggagcacattttgcacagggcttctggacttaccatcacaacagtagttaacagcctgttcttcacatgggctaatttcatgagattagcttctggtgttgtattctcagtagaaaaatacagtgtgggactatggctctgcttattttaatacttcaaaaatatttcaaacttagggaaacataaaagtgtcattttgtttctaggagaactggatattctggacatgtataatctgaattaagagatttggtgatttggggcgaatgtggtgatttctgtggcatttctagaagtaccagcagggaagcagccagatctttctgtgtgtttcagcttttttattttcagtattgcacttggatattcctgtatctttaaatcagcccttttgttcctattggctgtcagcaatgtgttgcatgaagttattggactgggagcagggtgagggtagccgtagagccacctggcactagaatttagccagattttggagaccaaagatcttttgaactttaaacctggaatggacatgagtgatgttctagtccaacttttccattttatggttgacaaagcttgaatccagaaaggttaaactacccgtgcaggtcacgtgggccagtgatgtttgaggagtgacaggaacactcctcctgcctctacccagtacattttcctttgtggcatggtggcctgaaaatactgtgaggtttaacaatgaaggcaggtgactggtgaggagagttccagccactggattctccctcagtcccctgtgctgtggcccttggtgacccctagatttcagtgcccctgcctgacactggagtccctctataaagaagcccctttctagctagctagctgttccatcccgcacacccccacagaagccttttgctgccattagtaagcacgcctctattttctcacctgtgattgatcatgcatgattgagttttgtctattaaagcaattgttaagttactaaaatggcaccaaaagaaattagaaaaaaattgttgcaaatgtcagtgaaatcttttaaaaaactgttgtacttagaagtgcctcaagtgactaatggaggcttaggactctgaatggtgtcacaaggaaccttatgcacagggacactgacatcagcctgtactgctggtaatgtcagagtgaagcaaatcccacctgaaggcactctcttgcttgaccgtgaagtcacactgagtggttcaccatgtgcctgcactcatgcaaggataagccaggtctctaggcatgggcagaaggatccctgcttcccttctcttccctttcagagcaacactttcagccatttccatgagtctgggctcttgttacccagctgaaatactgtttcctgaaactcacaaatttgctctctaccaaagcccaccttatgccctgcctttccatgaagcctgtcaagaaaattccaagaaagaaaatttgatattcctatatcaaagcgtgtgtctttcctctcctaatacctcttagctgccacagtaggtgcaatgtcattttagcttttgcagatgcattacctggtggtttcctagtatttctttcacttgcctcgattgctagattagaaatttactggggacagacatctttttaatatctttctcctactacttaacatatagagcatcaagggaaaaaaaaacaaaaattatcttttaaaaatgtaaacatttgcatgccaaccggtagtggattgtgcccttaggttaaaaatatgtattctcactctttccaatgaaatctgtagtgctgaaggagcaagttggatttagaaaattttggtgatttctttttaagcttgattgggtttttattttgttttatccaaaccctcccattaaaaaaaaaaattgattcacattgtatttctaagccagttaagtagatttaaggttgaatttgtagtggaattaggctccaaatcttagaagagcaaattcgtaccttgaatttttactgtttagataataacaggcagggtcatttctaagggacatggtggaaaggaatattcgtgatattaattagaaagataaatcgtattgtggccaagtggaccaagtgccagaaaatgcatcagaaactctgaatcctgcttctggtcttcattttcctagattgataagtaggcgcacacattcctgctttcctccctcctctgaagtgctgtagttcttcagggacacatttgccagtgggtctgagatgcaagtgtgaggtggcagtgtgggttaatgccatcttggtgtctcactctggagtggcactgcttattgccttaaaattttgccagatgacctgcattctccctccatgctatcttgggcaaatcccttaaaaccactcatgccactgtgtattagtgtacaacaaggataacagtttctttgtaactggcatgtggggaagaaccgcaaagtgacttctgtcggcagcagctctgtcgtgttttaaggtagtagtcaccgggcagaggtttggtagtgtcctctctggcagccaccgtctccttcagagccctgggccactgacatgccttttctccaagtctcttccctgagtattccccgcacctctgtgcctgatcagacacctcattctcccttggcagcaagaaggccgggtaggcattggagcccttgctgtagacaggataatgggtgaaagaggaagaacattttcatgagaggcatttcagagcctttaaagtggtagaaatcctgtagacaatgatgtttttaaaatcagggatttgcatctctgggactccaactcctttgtttccaagggaggttccctgggccacttggcctgaggttgggaaggggtcggtggttgcggggcagaatgtgatgcttggggatgcaggatggtcaggggcgggtgacggtgggaggagtggagcacgtcatctctccttgcccttccgaggtggtgatggaagctgcctacagctccagctcagaggccgggggtttctggggcccttggtgtggggcctctctcctagctggaggtggccccttcccccttgagaggcctgtgcctgaaatgcccttgtccttttcggccgtctcggccccagtccagtacttaggatccaagatcattttcagctccttccagccaagtctcactttattaaaggagctttgttcggagcagattggataaccgagccgcgactccacttgaacatctgagcagttggcccgcgtgggaaacagcaatggcagagaaagatgcttccctttggatcataccttgaggacaaaaaagggcagtcatataatctgtcatctaaactgggacgcttttgtctggaatgaatgcgacattgaatgggacgtccggacataagatgtaaattgagactgcagtcaccctaggtcagagacatccagcctttattatccatatcatggggaaaaaaaaatggaatgtgattttttttccccaaaacagcttaaaaaaaaatgctaagtaaaagaaaaaaataaaaagcaccttttaaaaaagcaggcctcacataaaatgccactaagacatcaaaagagaagtaaaaccctgctcaaaacgcccacgtggggcggccacagctcacccttgtgtgcctgtgtcccgtttctgctgtcccctttcccaaggacgtactctgccctaacctcaccctgatctggtgactcctccagtggcccatcctatgttcaccagctgggtcctcatctcctccgccacacaggctgctgctctgtcccccagcagacctctccctgtctctggggtgcccatgacccctgggaagtgctgtgcatagttctgtgagtgaggttgacttgttgttttatgcttagaattgtttctttctcctgaaattagatttttctcctctgatgactaggattctattttatttatttatttttattttccacgacctattatagcacatagcacctaacaggtcctcaggaagtatttaccaacagattgcatgaagtgagcccgttcttcctccctctctccttccctccctttcccaccccttcactggaaactcacagtcactaaatatgccatgaagttgctgccttttgcctttgcctgtgttttcccctctgcctggcatctgctcacatcctttctggcagctgccctctcatctgtcagggcccagtttgggtggcaacactcctgctgaggcccctgcccgcctcatcaccccagcccaagaggacagaacactgctgcccgcctcatcaccccagcccaagaggacagaacactgctgcccgcctcatcaccccagcccaagaggacagaacactgctgcccgcctcatcaccccagcccaagaggacagaacactgctgcccgcctcatcaccccagcccaaggggacaggacactgctgcccgcctcatcaccccagcccaaggggacaggacactgctgcccgcctcatcaccccagcccaagaggacagaacactgctgcccgcctcatcaccccagcccaagaggacagaacactgctgcccacctcatcaccccagcccaaggggacagaacactgctgctcctggggctgtagtgggtgtacaagttccctcctcctacggccccttgtcttagcggacttgggaggctcagaggctccagccctgtcttattggtgtttgcaggtccagaaatcttggcacatgacagttgcctggtaaactgccttgaattcattgagtggaacacaatatggtgtgctgtggcacctgatggccagcctggaggaaggggtacttttttctcattgtcatggaggtcccattggctcttcaagcatctctcccaagcatctaggagaggtgcttatttctcattctcacaaaggctctttgtggaccagcacaggaggcctgcctagggcttggatgaaaaatgagcatagagagaagaggttaagggaagcaagctcaagagtgggctcagagaaaagaatctgggggagtcaatgagatggcaggcaaggaacagtctccatttgatgctgatgtttgtgcagaatgactactttataccgtacagaaggagcacactctcttcttgtggtaggtcccagaaacttctacttgggggtacatgaggcccagctgggattgggcacagaaggtcatggctctgcacctgaccctcaccttaggggtcaggagagagccaaggacacgagtgatgggttagggaggactcaggcaccatggaatactgtggccatccttccatagaggagaggtacaggtggcaaggcaggcaccaggcagccgccgacagggtcaggaaccaaggcaggtccaggaaacagaggccaaaacagcagcaggaacctcaggcttagcagaccactgactcttctggaagtcttttagacgctctgtggtggggcagggacaagtccttggtgtttggccatggtgaagtgtgcagttagggtaggtgagtcgtgctttcttaacacgggggtaaggaaggagggtagagtttcagcagctcctgtttcttgagcacttgctatgtgccagatgtggtttgaactgtttacatgggagctcgttgggtcctcccagcaaagtcctatgtagcaggcactgttgttctttttgcagataaagaaactgaggcaagaaaggtttagtaagttgtagagctaggtattgaaccagggcctaacctcttaacagaagttagttagaggctgttacttgagtgctcacaggttggctggcaatgtgtttggaacccaatgtaatgtcattagattctgcctaaatcttgtgaagaggggatttccatttgataggtaagaaaattgagaagttatcatcagcccgagatcaaacaagggtatagggagtggtgggacctattaagttcagatttatgtgacttctgatgctatgctcagtgatagatctcttcttgaggataaaagtttgagaattagggttcctcgaaaaccctgagatttctttttttgaggggtacctttttgtgttagcagatttaaagagctggccattgtatttgatggtagctgagtaagccttttgaattggagtatcatcaactattactagatttagaataggtatattttgctaagtaagatcttaaagtttttcctttaaacttaggatagctgttcaaatttcaaactcttcttttttcagtaagctggagacatttaaccttttgtcataggcttaaagcagtcattaaacagggtcatttcaatgcaactttttaaacctaactcccctccctttttctctttaattatgatcagtggcttcatttgagcttacctaggatgcatttgagactataaagctgctttcttaaaacttagcaatgttggctgagacaaaccaactgtagaatctcatgctttcataaagaaggttgcaagacattcattcacagttgctcctttattgtgtgtgatgagccattggcatcaaacctgcttgggttgctatcagtttttcttttgagagctggtgacttgcaatttaaaacacacatgggctcaagggtattggagggacatggcagaaagtccttctgctgcctagtgattgagagtgatggggtcctaactctgtgtgaggatagctctttgacacagctcacctcagtcccctttacctaggtttaagttgttagcattttgctgtatttgctccatctctttttttccctgaagtattcagaagtgaattacagacatcatgacgtttagttcctaaatacttcagcccaaacctctaaaaaacaagaacatatttctatataactgtagtactgttctcacaaaattaagactaattgcctaatggactctattacctgatccattatctgaacttccccagctgaccttaaaatgccttttacagctggactgtttaaaccaggattcaattgagaattctgtattgcatttaatcggtgggtctattaagactctcttaacctagaatagtgataaaagctttttactcttggtctctttgcaaactggggacccccagccagcaacaccccacctgggtctcactctaccatgctggggtgccctagctcacctgtgttatagcttgtacctgtgttcagtggttcccgagttcttgcatggcacccaagaagaatgaggatatgctggacattgagggtgaggagggcagagtagaattttactgagcaatggaatagctctcggtggagaggggctgcagtcaggtgcttctctccttcccgtgtggctgggcccagggctttttatgggctcagaataggggaggggcaggctgcaggtagtattggaaaaggcaacatttgattcattaaaaggcattgttcagaaagaatcaatcaggaaagggtgggcagacaggaacagaagttctcgctctggttcgtgggtttcatccgggaccagcagtccagtctttcagccttcaggctgtttttggctcgaaggtggggtttcaccggggacccgcccctatctgcccaggcgtttggctgcttcctatcactatcaatagtccctccccttcaatgacttgtaggaaggttgtttcgcttaccacattccatcgtgtcctggtggcatcatcaatgaatgaacatgttcttttccccatgtttcttgtacgtactgtgtattagaagttggactaaaggcttgatcaaatttgaggcaggaatgggtgaggctacgtgcgactggagggacacaatgactggttctgtcataatcagtgattgaaattgatccctgggtaaatgtgggggcagtctcatccctccactatcaaaaattaacattttttttccccaggtgaccagcaagtaacgaggggaggggctgttttggtactgtatacctgcaaattttaaatattgatttactttacttccaaaggattggaaattttgtttttttctttctttgcccttctttgaaaacattgtacaaagtaaatctccttattttactaatggagaagcttctgaaagaggctgaacatacattgaagtacctttgctcagctgtaagcccttctggatcagaggtcagaccaaagtttgcagacagttggtccctgtggaccagactgaatccacacatgagtttatttggcctgtggagcactgaaacaaaaaaatgcaaatcctgagccaacgtttgggagatcccatattataatacaaatcgagatttccaggtttctggaaggtcttggcaatctagccacactgggcctgcatctgtgcaaggctgcatggctagaggtgtgtgctgggcacacccattaggtgggactgcgcctttctggccactagggaccgtacacctcctgttgttttcatgggggctggtttcccttgctgacacgtggccatgaggtccctcgaggtacaggccggcatttggacttgtcctctgcactgtttctttgttagcatttagaactgacttctcctcttcctcccccattgaggagcagcaccttactctgtgcagagtctgtctgtgatctgcaggctctttgcagagctacatttctctctggaggccttgctgagcagcctccgctgtctagggcattgctgagaatcacaacatcaacactaatggcccttgggccaaaaagtgtttgtcttaaaatccctgcaccaaatagcttgtgcaattactcctgtgagagccccagaggatctaactcttaggctgtttgttctagctgtattccttcccaccccccaaaccgaaatgacattaaaggatagtaactccctcccgcaaatatagataaaaacctctttactccctaacaaccacacaactatttacatttttgtgtttacctcctagtctttaagtatatgaatgcatgcaacgtcctttaaaaatatgtcaatcctagcctccacaccacccagccgaccaggtttcccagagggaagcattggaaatggcagatgggtaaatgcacagagctggcaaatctccatcctgcgggaggcttgctgtgcaatatagccatcgccacaataatggatcttcctaatgatccggaatcactgagcaaagactgtgccatgttcagtatacactaagtgagcatgcagggaatatatgatcagtttacaaacatttccacataagcttttttctctctcccactccagttttggtaaataaaagagcaaactagactgctttctttctctctctcactctccccctgtctccctccctcttcctctctgtccctgtccctctctcctgcctccctcattcactctgtcgtcctctctctctcctcctcctccttccttccttgcttcatttcccccctcatctctttcttcctcaccctttttaaaaagagacaggagtcttgctctgttgcacaggttagagtgcaggggtgcaatcatagctcactgtaacctcaaactcctgagctcaagcagtcctcctgcctcagcctccccagtagctgggagtacaggcacactaccatgcccagctaatttttaaaaatctttatagaggtgttgtcttgctgtgttgcccaggtgggtctcaaactcctgacctcaagtgaccctcccgccttggcctctcaaagtgctggaattacaggtgcaaaccactgtgtccagccagacaggtcacttttctgtaccattccctgatgttgtgagattagtgagagtccctactgtggaaccttgttcacgttgccctgactcctgatgcatggatatttgctgttaccaaagacacctctgctttaccaaatgttttgacagagtggaaggaaaactacaagacttcttgccctcgttttcttcagtctagaatgatgctggggtcactgagtctgtagggcagagaatctgatgtgttttttaggaagcggaaggtgtctgacacatagatgtttgacaaattttgttaatctggtcagagtgcagcctagaaaattaaattaaaaagctgctgaggagtgctggggtcgcattttgacatagatacaaaggcaccaatagggccaaaagtatgaggccagtcctagggctggtgaagtttggatcccctgcctgacattgtgtcctgagcccctggccccttcctgcacctctccctgagccgccggcccctcctcattccttcctctcctttatcttccgctgtctttgcctgtgcccccacgcccgtgccctgaatctggagtctttgtcttagtgcattctgtttgtctcactgtcttcctctgttttccttttcttgcggggaggaagggtagaaagagtgtaagaagctcaagtatgaggaagggaaggttgccaacttgagatgagtcagaaatgaaagcagttctgaatgtgtaagacaatgaggaaaatatttatttaacaaaaattgaactaccaaccaagccttcaggaacacagccagaaggtgctgtgtagggagaggtgtgcattaggatgctggagcgtggctgccggcgtccccaccccaggaggaagggactcgtttctctgaaccttgttaatggttctccccattgtagacaggactggctctccaccccatcctcagtgggtgcagctttggggaggccgtgaggctggtgatcttggggcctcctatgcatctgtgttattgaaggtaacaatgtcccttctacccaaaagtcatgcttttaaaaacgcacaatcttgaatccatttgggaaacatctttggaactccagaatgttgtctttctcagatatgtattgccaatgttgtattacttcatttgctaagaaacattgtcatcgactttataaaattattgaataattctatttgggggagaagcctggaagctaagattttaaaggttatttataagttaagtgaactggcaaattcttaaatggtaaataaaacctttcctacatgctataggtagttatctaaatcagggcctaacaagcttttttatttattttcctgtaaaaagccagatactaagtagttgaggctttgcaggactgatggtctctgacatagcactaaagcagccttgggcaatacataaacaaaggggcatgtgtgtgagctgatggtccacgggctgcagtctgccaacctctgatgttataagccattgattttctacaacatatatatttagaactgggagtgtcagtgttattttgtcatggtttccagattaaactctttcatattgctgctggtcggtcaatgacagactaattctgctagcattgactttctgggccagggaatggggttcctagatagtgcagtagctttttatttattttcttttccattcaagggtaacatgcttaaaatacagcgtatgaagcttttggatatccactgtaaattttaaggtctaaaaatgaatgcaattgtgaaatgtttttgccttagagaaaacgctctcactgctttgtgttataaatgcatgaaaaataatgatgaattaaatgcatacaaacagatgcagacataatttagatgagtgtattgcaattaaaatattgcccactttcgctacggaatattcgttggacttatgaccttagtgtaagtaatgtttaataaggaatctgcaatgtgtaactcctccgtaaattattaaaaggattggcattcctactgtataatatcaacacaagggatagaaaatatgcctggattcttaatgaatgtgtgctaacgttccttctggcataggaatgtgtagtaaatacacttcaagggttgttcgcatttttatccgtcattgttataggcatgttattgtgtgtctcctattgaagaactgattgatcattgttttaagcttctgtgacttttagatgcttaaaactaggcgttcatggtaggaaagtagagaaacatgtggaagaaatactgcgtttcaagtttgggagtggctggtagaaaaatcaaactaggctagtcttacagctttatcgcagttttgttttttttcctagtaggaaaatgatagtattggttgtatattaaaacactctctctgacactgacttgaatcacgtgcgagttcattgagaacagggattttaacttggttaggtgattttaaacattatttagcaaatctggaaaacaaaagagaaattttcaaatatctttcttccacggtggtgtactggctctctggagtgtgatttcatcttctcttattattgcatatgtagtcaagccatcatgttcttgaagtgagacttcaaccactagtggggccgtataattcaggatcttttgtttgtccttacatagtttcttggcctggaatgtcaaaatatcagaaactgttctttctctggaatcatctgtctccgtgatggcctcgccatctgtacagtcatccaagctagggaccaaagagtcgtcctttactctctcatccttccggctgctgtgtctggctttcagtgtttgtgtagagcaggggtctccaactcctgtggcgtgttaggaagtgggccgcacagcaggaggtgagccatgggtaggcgggcaaaacttcctctatttacagctgctccccatcattcgcattgctgcctgagctccgctgcctctcggatcagccaccagcattagattctcataggaccatgaaccctattgtggaactttgcatgtgagggatctaggttgcacactccttatgagaatctaacgcctgatgatccgtcactgtcccccatcacccctagatgggaccatctagttgcaggaaaacaagctcggggctcctactgattctatattatgaagagttgtataattatttcatcatctattacaatgtaataataatagaaataaagtgcaccataaatgtaatgcccttgaatcatctccaaaccatccaccccactcctccaacccccaaaccagcctggagaaaaattgtcttccacaaaaccagtccctggtgccaaaaaagttggggaccgttggtgtagaggactcctcaagcagcgtccatatctgccctattctctctattcctccacctaggtatagaattctatctctaagacacagacagaccatgttcctgcctgggcaaacacttcggtgactgtgcattgccctgggtgaacgggggcacagaggtctttgtgacgccctgcaacgcatccctctccgagccgcggtgcgctcttcctcctctgtgccttgccggtgcccagaaccacccccttctccctctttgcacaagtgccttgctctctcctttctcaggccagtgctgctgatctgtctgtgtgacccgggtgcacagtccttggctctgtgcctggccctgtgcaggtctctgtggtggcacttagcacatggcgctaagattctccctgataggccttcagcgccgcaagggccagcaccgagtcctgcacatcctgctctagtcccacatcggcccaggggcgttgagctgaggacggctccctaccccctttctgtgcttggccgactccagcgcccgttcttctgcccctccttggctctgcctccccaccccttggctgaatctctcctcctttcgtgcttgttctccaggtgacttattcaggtccatattttcattacccttgcatttcattaattttctcatttattttattctgtaggtttaggacattctttaaaacatgcaggttctgaattttaataatataaaagtcctctgtgagtgcccatcacattgcttttctgtcctccctacattaaagttagcactgatgcctttatgtttaaggaaagcctcctgcagaggggctctgcccatgtaagttcattagaaggcaggtgtacagcctctgtcacctgaagacctcttaactgtctattccttctctggtctatcgaggtgtattgggggggttacagcaccctctggtggccatattgtcaggtgcatttttgttctagccaaataaaatgataacacaaatcgaatagtcgattggagttctttttcagaggacatcgttaattcacattttgtgtgtttcagcaggtatttaagccattctcgaatagtgacacttatgcagaggagagaatgattttatttaagtaatttctactttttacatagctagttttaaagtagataatacatagtcttaaactttatttcccctttatttctttcttttctgttagagaatttcttaaacttgtagaattatccaaataaaatgccagtcactaaaaaggaataattaaccaatagtgggaaaaaattaaattcttcaaatgaagagtactgtattcatttcatatggtcccagagataaaatgtttaggattcatttttagttttaaatgtttatgaatcagagcttcaacactcttccaggtttctttaagaaaggaatttgtctatctacggattaattaattagcagagcctctctgtgtcaccaagactggagtgcagtggtgcggctgtagctcactacagccttgaactcttgggctcaggcaaccttcccacgttagactcccaaatagctagaccatggtgcatgcaaccatgcccagctaattttttttttcaatttttctgtagatacagggatctcgctatattgcccaggctggtcttgaactcctgaaggcctcaagcgatcctcctgtcgtggcctaagaaaggaattcctcatatagaaaaatattgttatataaatagttgcctatatccatgctgtttatggtaacagctaaggttcatctcaaaagtatttgtatttggctttggaataaaaagaaatttcccctttcatagggttctgagattgtaggagtttttagtatttcaaaaagttaatggaacaatctgtgatgtgaaagagactcagaagaggctagagaggtctttaacacattttttttttgtattgttatcccttccctatagctaactttgtagatgacattgtttttcagactgatgattgtgaccctcaaccatggcagcaacaatttttaatttaaattttttaaaatgcaaggttgggtgattttctctctggatgcttgagttttgtttttgataaaaattctaccaggggcaggggaaagagtccattaagtcttggtgcaagaaacctgggcagattgcctaagtggatatgcatagcaaagaactgaaaacagagtagggggtgctgaaaacacccacagaggaaaatgcggggcggggggtgaatgcatctgctcattttgtaataaagtccttcctttcctttaacatctcttaatgttacaaataccaacaaaaaccatgcatgtcttcagtgggacagaaaatgagggaggcatttagggagaaaaaagtgtcagttgagatgatgttaaaataaagtttattttctttgcagttgcagacattaagatttattctctgggctgttaggacagttcctgcagctctctgtggtgacctgagcattgatacctttttttttttttttttttttttgagatggaatcttcctctgtctcccaggctggagtgcagaggcgcaacctcagttcactgcaacctcagcctcccaggtagctgggactacaggcacctgccaccacacccagctaatttttgtatttttagtagagatggagtttcaccatgttgcccagagtggtctcaaactcctgtcctcaagtgatctacccaccttggcctcccaaagtgctgggattacaggcgtgagccactgcgcctggcctgtgccttggtttctcagatatttctgcccctgtagtgttctatgcactatgcagggaggtcctgactgctcagagcttaaattctgcattcctttattttaagtgtttggccaactgcagaggaaggtaccttgaaagatactccctcttctccctcactgctgggtcccctgtcataggagacctggcctgaggaggcttcttcctggtaacctgggttgtcactgggaccacatcttcccataagaataatgcttcaggttgtatgggagaagtgtctgacagcagtaacttcagcacaccctgagaatggcccttatggcagacacaccggacagcagtcactgaagaaatgagggttgccacatggaggttgctgggaggagggtgctaagtgaaggtgctgtataagctgcatgctttttacaagcagttgaagttctgctgtccagcccagagccactgggccaccctataaataagttcctccaaataaaccctgtgccttgtttgttagctctgggtctcttctttggcttcttcaacttggtgctgtccctgttgaagttaatacgggtttggcacaacacaggagtagacggttacctgtaccctgccagctgtccttgctacaaacatttgcccagagagtggcatttgtgccggttcttaaagtgtttcttgagctgcacattaataggccatgtcctctttcaacctgccctctggctaggtagaacaaacactcttcacctgggctctgagccagctgctcacctgcagcacccccctccttggagatagcttttcatgttgcatcttaccgagttgattgagtattcacttcgaagctccatgctgcacgcatgggcctgtaaatagctttttcgtgcacttgtgggtgtcatttcagatcgcttcatcggatttcagttacccaagtttttacttggttcaccgtaagtttgcaaaaaagactttttgttatcctgaacattgcaggtggaaacatgattaattttgaattatttttgtttaacttctaccctctttcctatttacagcctattttgtttattttaacttccgctgttaagacttctaaggccaggcatggtggctcacgcctgtaatcccagcactttgggaggccaaggcgggcggatcatgaggtcaggagatcaaggccatcctggctaacatggtgaaaccccgtctctactaaaaatagagaaaattagccaggcgtggtggcgggtgcctgtagtcccagctactcaggaggctgaggcaggagaatggcgagaacctgggaggtggaggttgcagtgacccgagatcgcgccccattacttaaaggaagtgggcttgtgttttgtggccttaaggatgtaatctgttggtaggagggaatgagggtgtcctggtaggggtgtctggctttagtgtcaccattcttttaggaattgccatgttgtggggtcacgtcttgtaggagaaacgttctgaagtcatgggattctctaccctcctctcctgctcttggtttccaccagcagcctgcttggtgtggttttgaaatggagcagagatggttttgatgagcctcactggaggtgctgctgagattaccgagaggccttgctgggcacctggagtcaatcatgccgggcactagcatccgtcatcttaggaggtagggattattatcctacctcctaagccatccctggagtggtggcttggagaagttttccagagaaaccgatcagttcataaagtttctgtaaaggattaacacagtgtagtccagaaatgtttgttcatgaagtcttggtttttgggtttaagaaagtgttctcctgtctgggcgtggtggctcacgcttgtaatcccagcactttgggaggctgaggtaggcggatcacgtggtcaggagatcgagaccatcctggctaacacggtgaaaccccgtctctactaaaaatacaaaaaattagctgggcatggcggcgggcgcctgtagtcccagctacttgggaggctgaagcaggagaatggcgtgaacgcaggaggtggagcttgcagggagccgagatggcaccactgcactccagcctgggcgacagagcgagactccatctcaaaaaaaaaaaagaaaagaaaagaaagtgttctcctaagtgctgctcaccctttttcccaaacaggacctaaccctgcgagggagggtgaattaggccatttgtttacagtttcatcagcaccaggcgtgcacggcgttagtcatggtccttgctctcaaggcactgtacttgtagcagcagtatggtgcaaatgtgcagctgaacagtggacacaggttcctggttagcatttagtgccacaggaatgacagggaggtcttaattgtgatcggaccgtgggagctggattaccccagactgtagctcacttccctgtaagcttttggtagggagcttggaattagcaccattagtagaaacagatttcaaagggaatggtacctgttccgtatgaaacactttaaaactcccggtgtccacacgtctttaaaaaagaggcttaaagcagtttcatttcatcaaccccaaactggagaagctatgaatgaccacactgatgaatatgtcctaaaatatatgtatattatataaagtgtaaaaacagacaagcaggaacatactaccagtttctatcacagctacccttaaactatcattggagggcaattaagtgggtacaacctctagctatttggaaatatgtataaaaatgacaaatgcctggttgggtgctgtggctcacgcctgtaatcccaacactttgggaggcctaggcgggtggatcacctgaggtcaggagttcgagaccagcctggccaacatagtgaaaccccatctctactaaaaatacaaaattagccgggtgtggtggtgcatgcctgtaatcccagctactcgggaggctgaggcaggagaaccgcttgaacccaggaggcagaggttgcagtgagccaagatcgcgccattgcactccaggctgggcaaaaagagcaaaactctgtctcaaaaaaaaaaaattaaaattaaaattaaaaagtaaaataaaatgatgaatgcctgtactcttagacccagcactcccagttctgccagttcatgcagcagatacatatgcacacgtacagagaaggatgcaacagatacatatgcacacgcatacagagaaggatacgtatgcacacgcgcacagagaaggatacatatgcacacgcacacagagaaggatacgtatgcacacgggaacagagaaggatgcacaagaacatacattccctagttgacggagtcgcagattagaaacaacagaaaagcgtccattaaacaacagtttgaacctgtgttgagatatcagcatcccttctccttctctcccccactccctctgccctctgcaggttttattctcagcctgattttctccattggatgtcagccctaggctggcatttgcagagagagatggtggctcctgcagagcttacggcctgtattttattgggctgtgttgagttacccctgatgtgagcaggagaatgggatgttctgtaaattggcctctagcccatcgtgaattcatattttttttataatgtgtgagtcacactcccttctgtcttcatttccttttcacactcccagcagatcattctctctattctgattggcattttatacatgaggcagcagaggctgagacctactgtattttgagacactgtagctttatatggcataattaaatcatagtcatcaatcactcttaggaggtaaggattattattggcattttccagatgagaaaaatggaggatgagaaaggttaggcatcttgctgaagtcacagcagacttaagtgccggagttggagctgcattccggtatgcttgcatagactctcttctcatgctcactgcacgccagtcacctggtatgctgaggccctgcctccaggccttctgattcagctggtctgcagccctggcatttccagctcctcaggtgattggaatgaaagccagagctgggagccactggtctacaccaccagtaaatgatcgggttctcacttgatcatttaattaagaatcttggttttctgctttcagtctgagaactcttgttcatgctctcaggcatgtcttcacgcaggaaagtgatctttgaaattaataggtgcttggaaagcctttaagcagcaggcagtggagaaggccactcagtaggaagggccgagcatgaagcctagtgcacaggcttttcaagaccccacggagggtcttcagaaaaatgggtttcctttgtctccgtggcttccagtctttgttggccagcagttgtctgcttcaaatgagctggctctagaggggcctggagaacccagaaaaactttgtgacaacctgacaagtttgtgttaatcttctgggcattggctttctgcacttattgctcactgaatcactgaaccaggcaggtggggtactggagggcaggggatgggtaagaagggcagcctttggaaggaaaatcagcagagggcagggaccggggaagaaggagtaagaagggaaacccttttcttaggttcttataaatcagaagagcaataaagaaaaaatttaaatctaaaaaatacatgattaggatttaaatccagtatgcttcactacatataaacctttgacttaatattttctgtagtagatgaaaataggactttttttgtttcccttctcttcacatggtattgagtttttttgtgttctgaatacgtgttaagattaattatgaaaatcaaattaccagatacttgaaatataaaattagtaatattcaaagacgattaaatgcacgatttccttttctcataaaaaaagaagcagacggaacttgtattctgaaagcaaatatggaaatcacattaaaaatcagaaaatcctcaccaccgccccccacccccatgtgcatttcatttctctttggtctgagttcaagggagagagaatatgaatgtgctgctagctcaggaagcttcagttctaactttctaaagagctgggaatgtgcttgagtctctgttatctcttgtttgcatttttcgctactttgcctccatttgatccagggaaaacttcatggtagggatgtgagatgtattttgagggctaaaagaaaggagtttgaacaaaagcaggacagtgttccgaatgtggaagcaaagagtccttccaaggggatgtgcggccaacgcctctgttcagcgatagtccagctgagaccaggacctgtgcctgatgcccaggccaccccacaggacggtcctccagcacctcatttctcctttcatcagacacctcttcactggcctactgggagaaaacggagatgagtgaaaatgtgcatacagaacatagggctcaaagggaccctagcaccagtggtgctcaagcctgtcccagcattagcgtcacctgggagctccaaaaacatattgttgccaagactcagtccaaagcaagtgacttccttggcctggagtgagatgtgggtggccagggtcaggaaccaccgagtgggtccacctctgcagactgggaaacagagtctgggaggctgcttgttccctcaaggacctgaagtgacatggggaggcaggactagccttggggctcctaattctgtcctggcctgtattccagtgtgccgtggggcacgtccaatttgaatctggccccagtacactctcaagccctgtgttgctctggtcccacagcttctgcccttgactttccatataacagcacattggtggccagggctttgcactaacctacctgcctccaacattgtttttgaataatggaagctaagcagatgcatattaatgcctgcattatggagaagactgtctcttcacaagtaatctgtagttgttagtcttgaaagtgggttaattcattgtctttctagagaaaatgattgcatggcctaatagtcttccagttagtctgtgtggcaaggtagaagccaggagtggattcttagctcctgttgagtgctgctgtcctgaatcagagatcttctctcccgggccactttgtcatgagcaggattttgaaccaagaccttttcttcacctgtctcgggggccctcaccgtgggctttgtgatcccctgacagctccaaaagcctttatcctcatccaatatctggtgaacagctgacacctcctgggaatctttaaaattgttctctaaagaaaccattctgctgcaagtacctatttttagactttataaagcccacgtcaggttgtcgctgcctttctctctgtctgctaagcctgctgtttgaaaggcagcaacaggatcttttgtctttaaaagttcagccccagctggtgcattccccacttgaactccatagccctggtgtgctctggggtacgtctcttccaaaacccaaaccacaggcagtgacctttacaccccaggagttgaaataatacacctggaggaagaaaataacttacaaacaatgagcctagagtataaatggctatgttttaaaaccctcgattttccttgggcgtatttaacctgtacagctagactgttgtgagttttgggctctctagggggctgtccaagttcagaacaagtgcatctgctggcagccagcttaaggagttagcagccctcaattccaataacgaacgtgtaaatcagaattcaggtgtgttgaagtggggccttgcacacatcctggtcagcccagggtgatttcctctctggccagtggttttgggttttttcttcacatgaactcgtctgttgtaactaatggtcactgagtgacttcagaggtagtgatagctcatagtgaagcccgtgacccacagcggtgggcacacctcgatcccttctccttttcctccatccccacctttctctccttacttcatcccttcctctttccacattgggtcatccagcagaagtcaagtatcttctatttcatatctttattgaataagagttttacgatccatgttattgaagtaggtaaatggaatctcttatgtggaattctctaaaaaagaatcaaaactccagtcaaaccaaaccaagtattccaaatcgtttttagggaaaaaagatataattagaaaagactggagagggtatgcaaactattaacattatgttagggtggtaggagtataagttatatttgctttttctgaatttctaaattttcttcaattaacatattgttcaaagtatcaaatacatagaaggaagagtgtgcatgcctgttatctagcaaacacacttcatgcaaagaaactctcctaaggaagtatgaagttatattttatccttatctatccaaagagagtgtgtgtgtgtcatatacctaaagaattagttattaagatgaagcattgcttataatgaaaaagttgaagcaccctaaattagcttaataatggtatatctttataatggaatagtataaagccattagaaatgatgttacagataagtatttaatgttatggaaacattttataacatagaatgaaaagtaaattgtagattggtttgtataatttgatctcatcttaggaaacacataatacagaaatatagatgaaggtctgaagggtattaatgccctaatgtattagtagcattacctcagagaagcaggctcatgagtgtttattttcttttcttctaactaagtatgtatatgtgtaagtgtgtctgtatacaggagatgtacatacacttttcttgtgaagaatctgtattgcatttactactggaagggtttattttagatttagatattaaagttacctctttgagtgagaacctatgatttatacttcttagcttaccttttacctccattatttaaatctgtctttttctgccatcaaatagaagatgtaacagtgataaaaaggctgggtatggtggcttacacctaaaatcccagcactttaggaggccaggggttcgagaccatcctgaacatagcgagtgacgtagtgagaccccatacctacagatttttaaaaggttagccagacgtggtggtgtgtgcctgtagccccagctactcaggaagctgaggtgggaggattgcttgagcccaggaggtcaaggctgcagtgagtcatgaatacaccactgcccttcattcagcctgggtggcagagtgagactctgtctctaaaagtataatattttaagaaagaaaaaacaaaaactagtgataaaaagaacttacaacaaactgatttttaagtggactgttgataattataagggctgagatttttaattgccatttgtatcaatgaataacccccctgtcaccacattttctggtgtgtttggtgtgtctggttcctataggagagacagtaatgctatttgacatgctttattgctgattagaagcctaatctctgtaatgggaagctcagtaatgaagcttgttcagaattgtgttacagtcggttaatgaagctctgagatcaagggcctggcttttgatggcccctatttcagaatccagaggtttgtttctatttatttgggttttgcaggtaagttccctggactgaggtgatctgaaggttagctctgctataataggtaaattgctaagaaaaacattggccttggtatgtacaacttaaaattttattggtgagatagtcttcttacaaaacaatcacgttaagctagaacttggtgtataaccagcatatatactcctgccaccctcagtgtgtagccaaagttctaaattgcatgcacagataacaggcatataattggtgatttcagaaaagttatacctggtgggcagtgagaggcgagccctgatctgggaaaccccagtgcttcaaggggaagcaatctgggaaactccaatgctgggattgggattcaatctgggaaaccccattgctgacaaggtacatggtacaagcttgataaaaacttgcttaatgtcacacttgtaatcccaacactttgggaggctgaggcagctggattacttgagttcaggagtttgagaccagtctgggtaacacggtgaaactccatctctacaaaaaatacaaaaattagcctggtgtggtggcatgcacctgtagtcccagctgctcgggaggctgaggtgggagaatagcttgaatacaagagttggaggttgcagtgagctgagattgcaccattgcactccagcctgagctacagaaaataataataatttaaaaaaacttaatgatgatagcatttgagttggcttttcaatcctggtttcctaaatatgtgagcctggaccattaaactgtgtgacaaggagctgtcatcttaacatacagacattaaatgcattgttcaagatcagaaatgatttcttggttctgaggcactattgactgtgtgtaaggtgccatcgttaatttggtaacaaggggagacagtggcagggaagttccttttgcctgtcttgtgataggcttcctattttctcaaaggttaagatattaaattgtcttaagcaaagaaggtatttaagggcatcatcagggttagttctcaggtctcctgactcctagcttctctagtttagtgattcacgttagcctttcaacagtttaccactcactttaatggtttttcctagctgtcttgacatgcttttcactgcttacatggttagtttcctacctagctgaatgcaggcatctgtgctgtctgctgggttcgctggtggtgatgcagcccacaggtacctgtctctttgaggggagttcagcaaccatctatttatgtcgaaaggcactgtactgggagatgaagaacacggagttctaggcctccaggaatttatcatcacttgctaatttgagctgagcctggcacttgaacataggccatagatttccagatgtgaaaaaaagaaagaaagaaagaaaaggatcctttaatgtatagacttgtctttctgcctgctttcttcacttctgatcattttaaacaattgatatcctagtttgatgtgatcatgttccaacacagcacaacagcatgtatggtttggggcatgcacctgtggcagttgcaaaggtttttacagtgaagtggctaagaggagagtaagaccagtgtatagggtgtggatgaggtcagatgcgagactatttcttgatttgagtcattttatttaggagctatttctttggaatactttatatatgagaatgtacatctgattggaagacagaaggtactgaaatttacctcttgatcaaattattctggtataaaattaaactaaataccaatcatatacttaatttcacagacttgcaaataatatactggggtaatggaagtaagagacaggaccttttatgtggtatgaagttctgtgataattcctatcttcctttgtacctaaaagaggcaccctctcctgtcatactgcaaacagatgccactactacgtgtagacacatttgccagctgtggcacagctggtcacccagccctcatcacagctgcctgtaaaacccagatttattctcttccccctgatcttttttagaaattactggtatcgttttagagagtatccaacttacacacaccacttaaataatgaattttccaatttcttctttttccacggccttcacgtcatctggtaaatattcccctcaggttggcatctgcttctgagaccctgctggacctagatatattcaccagagatgggtgaaggctttggaagagtgaagtggttaggaacatttcttccgatatctcctgctcattgtttttgacctctctgatttccagtatattctctgctccagccacacagctttcctgaacagctaagtcttgctcaccggtcagggaccagctcaaaggctgtccctttttaaatttatttcctgggtcttctcctggcctcttccctgcactcggtggagatgcctgccccatggttttcagtagcgttggctcttagctgttccgttctggggaaggattggttgttttccttttctccatgtgtgttgtgaatttcattctgtgtcaccgcatcacgcgaggtgggtagggaagagaacttttacgctccccgctgtcgttagtggcctgattacgagtctgtgggaaagaatgaaggttggaaagaagatctggtgggaaagaacaagggttgtccttgagcagccaaactaagctgtgagaatgttaatgtaataaagcaggaattctaatgggctgcctgctacagaggagatgggagatggtgtagggctcatgactgtaaaagcaggagccaccagcagatggtgatgcggcctcttggcccaggtgggactctgcatctccccctcccatggacattcacttgataagtgttgggccggtcacccatgccctggtcgttcttatcttatcgaagagtgctaatataagtaagctgtaaattcccattgtaagaaataattgccttttaaaagggagcattcaagaaaaagaccttttggctcaataaagcctttattttcctcaacactcttggctcttaaaaggggcctgttcttggccttgaagtgggaatttacacagaactttaaacagaagaaaccccctctgccttgggctgcaacttgttgtccctggcagggtttgggctgtggggtcatgggatctgtttgtttgaccgttgtatgcaaaaatgattttaaaattggcctccctaatctgttggagacattagttaaaaaaaaaatgagagtaaagaggaaaatattttgctattgggtatgcactggatccatttttaaactgagagaaggtgaaaggggtgactggttgatttcggataatacttttagagccacggggaactgtgaaagacaagaaaatgtaaaaaaagcacattgattgcaggaccggtggtccaaaagcagcacgtgaaagaggtttcaaggctgtttctacaaacaagaatgccaaaggtggcataggacaagaagcttgctggatgtcacgaagctagtggagatgggatccaaagctagttttggctgatgaaaatacaggctcatgccctgtatgtgaggacagtgggacagtaatttaaacagaagtatctagaggagtttccttattgccttgaatgtatttctttttaacattgctatggacatttaggaaaagatgccactgatattccaaaaggggcattccatacacctgagagggatccctgaggctccagggtcacctgggccaagccaggtatacacacgtctcatggcaagttggctgttatcataacttccctggtgttgttttgttgcaagggcagcattgtggggctgtggtttgaattgcttttttgtgtctcttgaatacacgaagttcctcctatagtcattggctctgctgcctctgatgaggcacttccgtgttccccacatttgaatttgctcccgattcgagagaggcaggcatccgcggcagcagcttccaacccagacaggcttaagccgcgcgagggtgcccgggtgggtggctgcgcagggccctacctgggcgggagcggctgcagagccctgtccacgcggtgcctccccagcacggcacctcccactccaggctgttggttacctggccgggagctggcggagaccaggatttctcctcgccgccgttgctgttgttaggggaaacagaccatctgcatctagacctgcctctctctccgctccccacttcagacgagctcttcctgcctggaatctggtaagtgccaccgaaggttccgttccctttattactcgattagtgcccacagcatcaggagaaggttctcttaccgtgaatccattagctttaacccaaatgtgcaggattagggggattatttgaacttgcttgctttctttttaaaatgtccattagacattttttgcatgcttcaaaatcaaaaggcggcacagtgaaaacattttaattatttatgtatttaacctgtatcatcttgtttctaacctcttttcttcagggtggtgcagtcaaaaattacacagatattgctctggtgcctctccccccttttatgaataaattactgcatttgtcatcactgtgttcctgaaatgtcaaaaatagacactgtaaaggaatctgtcatgcagagttcagaaattttcaaatttctgagttcaaaacctcaggtgaagcgaggacagatcttttatttaaaatttgattctttgtaggcttcactgtgaaataagttcaatttagagcatagctaatgcaatcagccagctcgtgatgggacaacatacttctctattgttttacattcacctcctgggatacacacactttctcatttgttttataacctttacaggaaatacctggggatgagtcacatgacccctaacttgagtttttacatgtattcacccagattaaatgattttgctcttatatggataaacgtgcagttaggaactttaaaaaattgtaaatgaggtgcataatcattactcattgtcttttactgcattcttcagccctcaaacatacaaactgttattccctttaagagaaaataaaactggcacttatgttttcctttactctaagttaaagactacccatgttatgtgccattaaaaaagatgtagaaattaatctgtctttttctttgacctaatcttactagcagggatattggggctctacttttctgttctctctctctctttttttttttttttttttttttttttaacatcagccacaggtaatactctccggtaaacatataacttgaggaaaattgaattaggttaatgctggaatagaaaaccagggcagtgcctgctctttttggataattctgtataaacaatgagaaagtctcaggctgccttagacaaaggctgagacgggagctcctgatgatttttatgagggggaagaggagatggtgaggaggagggcaccgagcatgtgcagcaacttgaagcatgtcagaaagaacatttgccagaaatcttcaaaaccgtggcggtcggtaatgtgtgaaattgaacttctgaccctgtttgcttgatggcgacttctcgttgtgcttgagaattgtgtggcattgggtccctggatgtgggaggaacagcaaagtggtttagtgaatagagagggaagtgccttcctttttgggtgggacttgccatgatagagcctgggccgtcaccttaaaaggagatgtttctgttgagagatggaaaattggcaagacaaacgccataaaccttaacctgtttataattccttacctgtaagctgctttgcacgcaaggtgatggttctacctcataagggacaaggaagaacagcacataaacctgactgaatggagtgtggctgtgggtgggagcagctttacaagaaggaaacggggccccctcctgagacacccccgtttgcttctgctccttccttgccattgacgtgcccttctcctgaaactacccacacctgtgtttggcaacaagcggctgccccttgatccagatgcatttttcaacttgcgaactctcacctcttgccaagggacccaagtacctggttaatgatctttaatgtaaatgatcctttgccttgattaacattgagctgggttagtatgcacaggccgagctccgtggtcctcccatgtgatcccttccctgccagccacctgcccacctgtaggaactgggcatggccagttttctctttatgtgctctctttgccttggatggaatttgggctgagaccgatgaggtggaaccaaagctgttcagcagaagagagcaaccacagagcagcctgttgggtggagggcttgagggttcctaaaatccgaggactttctggtgagcctctcccctgagcctgcttgagggaaggcgctgccccacacactctccagtgggtgggggtgggggtggcagcggctgatcaaaggttctcacctgcaagtgataatagcctgggtctctttggcaccaacctgccttcttcacctttctgctcagacaccccttggcacccctacataaaggaaagagctgtctggatggcctagtaactgtaggataggtaaagttagccctttcttctgacctagatatgtgatggtggtatttctacatgtttatgtcgagaactttacaaagatgaaagaaaagctttcagagctgcagaaatgagaggtggcccttttttaaaatttattttaagaaacaacttttaaaaccactttttgaaaaattggatggcaccgtcctgcagcctatcagatttcccttgagaactggggattattggcttattccttgctacctccaatcccaaattaagcagagtgacatgtaagaagctgggtacatcagcctaaagcgtttatcaggtatgtccttcccaactggatcttttctactccctggcccgaattttgttttagggaatggggcctattttaattgctggtggcaaaaggatccctgggcagtgtttccatggtcctctaaggtggagtgtcggggagctgggggacacacagtggtcatgggttatctgtcttggcctctttcccagaccaagttctgtctcatgcttattggtttggctgctagttatagaatctgatgtttaccttagaatcctaggatggaaagggttaagaatgatttctaatttgaattccttgtttctagggagttattaaacctatacattacatttattattttacaaagcactaattcataatagttgacaggaacaactattttttggcttctttgtttttttgtttgtttgtttgagatggagtttcactctgtcacccaggtctggagtgcagtggcgcaatctccgctcacagcaacctctacctcccaggttcaagcaattctcctgcctcagcctcccaagtagctgggattacaggtgctagctaatgtttgtatttttagtagagacggggttttgccatgttggccaggctggtctcgaactcctgacctcaggtgatccgcctgcctcggtctcccaaagtgctgggattacaggcatgagccaccacgtccggccttctttggttttcatattgattatattttctaagacaaatactcatttatatagtctaataaaaattgttaaatctaattaaacaactaataaaaatagttgtttaatccacgttgacatcttcttacattgcgatagaaattttgatatatttatccatatgatgaattgcttaaagccggtggttctcaaccagtggcagttttgccttctctcccacaagggacatttgacactatctggggacatttttcattgtcatattcaagggagtggggtgtgaagctggcaagcatctagtgtgtagaggcctgggtgctgctccactttctacattgcacaggatggcacctgacacacagcctaaagcgtcggtactggttgaccgtatacgaaatgctgtggaagaccaggcacggtggctcacgcttgtaatcccggcactttaggaggctggggcatgaggattgcttgagcccagcagtttgagaccatgtttaagtttaagttcatttaagttctctgaagtggtgattctgatgctatatagatgaaggttggtttgttgaagagctgactctggtatttcatccaacatctgcatttttctttagctaaggatgccttgagaaacattctagtctcttaggcctgaatttgttattagcttaatagctttcctctggttgaatttaaatggaaagaaaattgcatcttgcaacaggaaaaagaacattagggaaaaactgaggaaatggaaataaagtgtggaattttgttaataataaatcaaccttgatgcattaattgtgagacatgtcctgaaccaatgtagatcttaataataggggaaactggcttcagggtacgtggggactctatcttatctttataataattctctaagtctgaaacaaaaaagtttattaaaaaagcacaaacaaaattgctgccattttgttaacagatatagtagtcaatcttactgttttctttttctttgaaataggctgctgcaaaggtatgttctttgttatctcggctctctgctcagggtagccatgaaatggctcttttaaaaatgtgcccagataattttgaaccatttcaaaccatattatgtgattttaatttattttccattgcattcactaactcatttctgggtgatgtatttaaaagactagacagaatttacaggtttaaaaagttacattaacagaaaatgtaggtgccagttgaaatactgtcaactggaagtgctaccagcaatgtgctagctggacaatgggacttgtcccatttttttgctgggtgacagctatcactgcctcagggaggctggtgccatttaatgcctctgataatcagaataagtaattgtggcttctgggtctgtaaagccacaaaatacatatgcaggcctattttaattgacggtaagtcatgaaatacactattttcgtattaagataacgtggatatgttatggaacaaagttaaaaattagcatgaatttttaaagtactactggagattgttggctttaggttcgtgaaccccattcctgcccccacactcctgttagtggggctaccagaggggccagtatgaaaagcactggacttacagatgaaagaacttgagctggaatcaattcgagtcacttaccttcgctacaggtgggcagaggagtcatcctgcaattttgttgtgaaaacagaatgagataatataaaatgtatttgaatacagtgaggtctgtacagatgctgaatctattactttgcagtaggagtcaggtgtggccccacttccccaccttcttacctacttgtatcttagatcttatatatattgatattcacttttggtggactaaggttgtctttgttgcaaacctggactctcttgtattcttgctcagtgtgtgtatgttaatgttagataaagaagattaggctggtgcattggctcacgcctgtaatcccagcactttgggaggccaaggcgggcagatcacttgaggtcaggagttcgaggccaccctggccaacgtggtgaaaccccatctctactaaaaatacaaaaattagccaggcatggtggtgcctgcctgtaatcccagctacttgggaagctgaggcaggagaattgcttgaacccaggaagcagaggttgcagtgagccgagatcacgccactgtactccagcttgggtgacagagtgtgatcctgtctcaaaaaaaaaaagcagaagattatttggaaagctatttttaaattattcttcaaacatatactaaaatagagaagacaacatgagagccaacagcataatgaaaccccatcactcagcctcaaccgttgttaacagtttactatctttattgctactgaaggcagttaaatatttcttggcagtccttttttatttagcatataccatcagggatgacaatagaaacaggtttcaaagtcaggtgaaataatgtttctctatatgagttcaccactaacttgatacacagtttatgtttatgtttatgttcttattacgttcgtgtattaaggcaacctttcatccctgccccctaataggtaactgtctttatttgttctgggattatccctcctccattgccctttttggaaagagtatggatatatttgtattttctcttactcataaagcagcacatggtacatactgttctgagccctggttttctttttttcacttagcgttgtatactggaactcactcaatgtcagtatacagagaattcccttgtctttttataactctgtgctatacgctgacggaagttcattcagtcagtcccctattgatggacacttgagttattctcagacttgtccattgttttgcaaaaatagccctgggcatatgtcatttggtatttttgtcgaggcattccaataaaaataagtaaattcttcctctcttgccttgaagatgtgcagctcctcagtaaccttttattctctaaagctctgtcctcatctttaatccctgatttaagaggtgcagctcttcaggccataaacctttcttcctgcctcaagtttttaaagctacaaaggaacctaagagatcccttgtgttttacagctaaaggacctgagagcaggaaacaaagggagagccggaagcccaggtctcctgttccctgcctggcaggtgatattctttctgttaaactctctttccctctgcctattattggccaggctgtcctccaggacagtgcttgccaaagtgtggtccatgggcagcagcatccccggagctcatcagcaatgtaagatgtcaggccctgccccagaggggctgagatagaatctaccaattactggattccctgggtgactcatgcagtcaggttggagaagcgctggactggtggctttctccagaggagcatgcaacagcggtttgcaaacagggatgatgcagttccttttcaacacgtggatttgcacttcctcctggtgcgctcctccagcctgcctgtcctgttcacaccagcctccccctggaaggggttcagacttgatcctttgggtggtagggtctttcttggatagcgtagccatccattcctgctgcatacattcaacacagccttcatccttcgccatttgtctctgatacttcatactccttttgtttgacaagtgccctagctttatttattttctcatcattgttgttaagggcctattgtgcttgctagtatacacaccactatgtaagttactagttcaatttatttgttttactgctgctgtgaggtgtgtccatgtgtgcacatctacctgtgttaataactgataatattgggcctcagtacatactttttttttttaagagacaaggttttacttcgtcacccaggctgaaggactgagacacacttgtagctcactgcagccttgagctcctggacccaagtgatcctcccaccttaacctcctgagtagctgggactacaggcacacaccaccacaccaactaatttttttattttttgtagagacggattcttactgtgttgcccaggctggtctagaactcctggcttcaagccatcctaccacctcagccttccaaagtgctgggatgataggtgtaagccgccgcacctggccctcagtgcatacttagatatacttaaataaaaacttaattgcaaattacttcttaaattatccacaaactgacttggcagtaaaagtgactacaagtagtgaaaccactgtcataataaaaataaaataaaagtctttattgttagatttagtatttctaatctcttacatttcagttttggaaggtaaatttttgggaagtggtggtaataatctaagtatgtctagattcagtgatgagagctagtacactgtaggaaagagttgagcataacaatatggaatgttggtaaatgtataggggttttctttttaaagacagctttttatacaaagaaacagatgatctttttttttttttctaaactatgttagctatacccaaattagtaaatgttaaaataaccatgactggtaaaaacattttgcaattttttttttttttactttttatataattaaatgaaattctccatttggtagttgatctctcagacaaattaagtcttgccagactgtctgagaagactagtgaatcagaccctaaaaacttgtagcatttgaaaaataacaactgtgtactgcaatttataagggcataattagagaaagtttttcagtctgaagatttatactaatcttatcaccctggttttagagaacccagttcaatccaactgctgtgaaaaagccactgcttttagccacagaaaataaccagtttcatagaatgacttataataaaaaattcaaccattttgactccaaaaacctagctggccgggcgtggtggctgacgcctgtaatcccagcactttgtgaggccaaggcgggcagatcatttgtggccaggagtttgagacctgcctggccaacatggtgagacccccgtctctactaaaagtacaaaaattacccagacgtggtggtgtgcacctgtaatcccagttactcgggaggctgaagcaggagaattgcttgaacctgggaagcggaggttgcagtcagccaagattgcaccactgcactacagcctgggcaacagagtgagactccttctcaaaaaaaaaaatgcctagctgactttatcatagatctgtctgtaccttgtaggcacaaatatatttacaaaataattaatggtgatttacttattcacaataagcagttattttgcttttggtgtatatgtgacaaggtggttatgtggagtacataaaggagtaaagtaagtccgttgacttcaagatgcttacagtctaatagaaaccttgaaatttccactgggcaaggttttcttgggattgctccaaccaaatgaatgagcaggcgtctaagtaaatgaaaatcactctcatcactttccttcacattatgttaactggtgacaggtcatgacgcatgggaattgcttatgtttctgagctttagtcttgtaaaaataagtttagatagtccatcatgttcttcacattagacactcattacataaaaggttttatatgtattgtagatctttctgaaggtcatctatgtgaatgtttaaaaaagaagcaagaaggtgctataaaaagcactagaggtcaaatggtttgcgagacaaaatgaaactctccagctctgaaatccaacagagtatgatgaagaaagggaaaaaatagatcaaaaaatggcaggggaggaactcggcatcaaaccagtgataaagcagaatgtggatcagatccagacatccagtagtctgtgagcatctccatatgggatgtttgggttgagagttcaacccatcaaatacattttatccataaccataagatattctaagatcgaccaagtagagtaagcaatgtagaatcaaaggtatcatctttattatgtcctatttgtgtttcctgcttttgaggttcttagtccttttaattaactcctaatgaactaatatagttttgtggtcaccagcttctagctagtacaggcacagttgtgggttggtaggagaatgagcagtaaagccatgagctaacacaccaagtaatctgttgtgttcacaaatgtccaaaagaataacagagattaaagaaaggtaaatacagccacctggcaaaaatatttacccttttaaaaatgatggaagttatatatagaagaaatgtttttggtaaaaatatttgaaagtttgttttataatcataagtagcttgggctattttgactagaggggtgtgtgtgtgtatgtgtgtgtgtgtgtgtgtggttggcagggagagaaggagggaggcaggcagctggtagggactgtggagtgtgtcagttgggagagggaaatgagatgattaagttagtaagaatagaaaacatgtaggaaggcggatcttgaaatttcagggctattcattagtcattagttgaagatttcacagagaaatggtagaaaccaccagtaattaagaaatagcattattgtttaaaaaaaaaaaaactcccaaaccctttccctggcattctggtagaatatagttttggtctaacccaggtcccctctcatttcctttcacatccccttggttctagccacgctagactgtctgggttgtctgtatatgttctgatgtttgttttcctctgtgctgttcttctggcctcagaatcctagtgtccttgtgcctccttctgcatatgtctggactttgcttagctgatgagatccagttcagataccaccttctgtacaatggcttccttaattcctttaatttctcttaattgcaataaagctatttgcagaggaatgaaagatgctcccctttgcgctgggtacaggatgcactgaaactttcagcatggggcgcggtggctcatccctgtaatcccagcactttgggaggccgaggcaggcggatcacctgaggtcaggagttcgggaccagcctgaccaacgtggcgaaaccctgtctctactaaaaatacaaaaattagccaggcatggtggtatatgcctataattccagctacttgggaggctgaggaaggagaatctattgaacccaggagacagaggttgcagtgagctgagatcgcaccactgcactccagcctgggtgacatagcgagactccatctcaaaacaacaacaacagcaacaacaacaaaaacccaaactttcagcaggagagtagcttggttcagcccagcaacatcggtttgaagattatatcaagttttccagtcaaatgtaaccagtttatggatctgtgtttgcacggggtctgaacctcccctcctcaggtataagctcttggaggacagcctgctgcttaaggtacaggagaattcatctttgctggacatggtaacgtatgcatagagatctggcaacagaacttaagatatgtgggagaaataataggcaaaaactggaaagagcacaagtaagagaagagaaatccgcagaagtgagaagtaacagaattgctggctgaggttggaggcatttaagtgtgtgggtgtttgtgggaggcatggtggtctcctgttccttgacctcattgggcaaatattacagcacgaacatacaggtaggaatcaattgcatccccacctgggcaccttcatcggcagttggggtacaccacttgctacagtgtgatggaataagggacgatccaaaggcactcagttctcccacccatcctgtgcacaaggaaaagacctttgaattgtgtctcccctgttgtcctttgcattgtgaaagtgcatattagttctcccatccactcttttctctttaagctttagcatacggttgtttgccaagaatggaatcagatagaatattttcaccaggaagtgaaatttaaagtgcttgaaaaagatacaaggatatctggaagttccaaccggcgccattttatattttaaccatgacaagtagctgtatatcatggaactttggaaaacagagattgttccatttatttttcacagatgaaaaccagagtgctgtgtggggatcaggaagagggaaatcaaccaaatgccttattttagagattttttttttttttctgggaaattggaaacagcgcttgtttatagccaatgcagcgtccttgaaactctcctacttacagttctggagctgtagtttcctccctgaagaatgggttaaggcaggcagggtaatatgcatagatgggagtgagagtggatggcctacagggttgttaacctctagtgcaacaggaatatatgaaggtacttgggctggtggtcctgtgcagaaccagccagtaggttctaagagacttgatagccgagggtccctgggccctgttccacctttttaaaatttctatgacttagtagcggcagtaccatgcccatcccccagtgatgtttggggtacagctgcacccttggccgtgcctctgcactcactcacgagtgtcatctgacatctggctcttgaccaggatctgaggttgcttaagcaggatccaggtcaggttttttgttcatggaaggtggaattttggacctttcccccaaaaagttgacataacttaaagagaagggaggtatattgagaccagcctggccaacatggtgaaaccctgcctctactaaaaatacaaaaatagctggcatggtggtgagtacctgtgtagtcccacctgctcaggaggctgaggcagagaatcagggggcggaggttgcagtgagccaaggtcatgccactgcactccagcctgagtgacagagtgagactctgtctcaacaacaacaacaacaacaacaaagagcagagtggtattatttcctcactggaacattaaatggttcctactaccaaagagttcctgttctaatgggggtttaatataatagtaacattttattcactgggattcactcgggggaaagtattcaggaacaaagtgacaaaattaaatataggacatatgaacattgtcattttggttctagttcttacaagggcttatggtagcaacccaaatagaagtatttgctctaactaacagataaattattagcacttcagttgtttacatatgagtcagagcatctaaaatttgttcccataagtaggttgagcctccttctcagcctgttgtcatagggtctaaaaatggaaacgtgagtccaaactctttccagatcataaaaataattctgaattagtagagcataaatgaatgtgattttattcgagtgtcattttcaagttccccaggccaggttgagaccttttaagtcatctgaaattccctgtagggaggattaagaaaatagtagcagctttgcttctggccttagacagttttctaatgaggtcagagcctctcaccctgggagaagcagattcactttgccccttcagcattggtttttgagaattgctgtctgaagctattgcatagacaaggtcactttttaaaagggtacatttctgaacctggagaaggagtgggttctgaatgactggctcttctgattaacagagctgtatatcaagctgtgctgaaaatactcctcagatatattaggccacatttatgcatgagtgagctcactgtcgtgacatgggagtgaacctttgctgattcgagatcctggggtgccttcactttggaacactgattctagatatttaatagcagttttaaaattaggctaaatgtagtctgactgcaggattcattccagtgggaatttttttgtttgttggttagttttttaagcctgaatatgaacccaaacatgtttcccaaaatgtgaaatgaagagtgaaaacctaacaatgggataagaaagataatagataagagattatagttcaaactcggcctgcactcaggaaatggaagcaattcctccccctcatcctgcccccctcctcctccgcttactcttccccctcctttcttagaatgccgggggctagcctgttagttccattacttacttgccttgtgactcataacgttttcatcttgggtatttttctttcttggtctttgtaaaaattctaagcatcatagagcatatcaccnnnnnnnnnnnnnnnnnnnnnnnnnnnnnnnnnnnnnnnnnnnnnnnnnnnnnnnnnnnnnnnnnnnnnnnnnnnnnnnnnnnnnnnnnnnnnnnnnnnnnnnnnnnnnnnnnnnnnnnnnnnnnnnnnnnnnnnnnnnnnnnnnnnnnnnnnnnnnnnnnnnnnnnnnnnnnnnnnnnnnnnnnnnnnnnnnnnnnnnnnnnnnnnnnnnnnnnnnnnnnnnnnnnnnnnnnnnnnnnnnnnnnnnnnnnnnnnnnnnnnnnnnnnnnnnnnnnnnnnnnnnnnnnnnnnnnnnnnnnnnnnnnnnnnnnnnnnnnnnnnnnnnnnnnnnnnnnnnnnnnnnnnnnnnnnnnnnnnnnnnnnnnnnnnnnnnnnnnnnnnnnnnnnnnnnnnnnnnnnnnnnnnnnnnnnnnnnnnnnnnnnnnnnnnnnnnnnnnnnnnnnnnnnnnnnnnnnnnnnnnnnnnnnnnnnnnnnnnnnnnnnnnnnnnnnnnnnnnnnnnnnnnnnnnnnnnnnnnnnnnnnnnnnnnnnnnnnnnnnnnnnnnnnnnnnnnnnnnnnnnnnnnnnnnnnnnnnnnnnnnnnnnnnnnnnnnnnnnnnnnnnnnnnnnnnnnnnnnnnnnnnnnnnnnnnnnnnnnnnnnnnnnnnnnnnnnnnnnnnnnnnnnnnnnnnnnnnnnnnnnnnnnnnnnnnnnnnnnnnnnnnnnnnnnnnnnnnnnnnnnnnnnnnnnnnnnnnnnnnnnnnnnnnnnncctcctttcttagaatgccaacaactagcctgttagttccattacttacttgccttgtgactcataacgttttcatcttgggtatttttctttcttggtctttgtaaaaattctaagcatcatagagcatatcacctggagaaaagacctacgttcattatttaatgaaggtaaaaagtaaagaattgagtctgcatcctaagaaattagaaaaagatcaactaagtaaacaaaaaaatataaaaactaggagggaggaattaggagatgataagatttaaaagttatgtaaatccaatagctggttatttgaaatgaccaataaagtaaactctcattatcctaactcaggaacagaaagaaatcatcctaacttagaactagataataggaatgagaggccgggcatgatggctcacacctgtaattctagcactttgggaggccaaggcgggcggatcacctgaggtcgggagtttgagactagcctgaccaacatggagaaacccatccatactaaaaaaatacaaatttggccgggcatggtggcttatgcctgtaatctcagctactcaggaggtgaggcaggagaattgcccaaacctgggaggcagaggttgcggtgagccaagagcactccattgcactccagcctgggcaagaaaagcgacacttcgtctcaacatcaacaacaacaaaaaagaaagaaatagataataggaatgagaaaggagacacaggagatatcaatagactttataagaaaacattacatgcagccctgtggcaacacatttgaaaatatagggctgacttcttaggaaaatacaaattaccaaagttgatccaagaagcatggaaaagttgaatagaccaattactatagaagagataggaaagatgattaaaagttaccattgagaaaggcaccaggaatccatggatttccagctgaggttttgtttgtttgtttgtttttggagatggagtttcgctcttgttgcccaggctggagtgcaacggtgcgatctcggctcactgcaacctccgcctcccaggttcaggtgcttctcctgcctcagcctcccaagtagctgggattacaggcatgtgccatcatgcccagctaattttgtatctttagtagagacggggtttctccatgttggtcacactggcttgaaaaaatagaaaatttgagtgttatttttactcttctaggacatactaaaacatggaaaggttcccagttcattttataaaaccatcaaaattttaatttaaaaatctgatgaattaaaaaaataaaaataaagatcaatattatttatgaaagtaaatgtagaaatttaaaataatttattaacaaatagactcttgggtgcatcaaaacacgaatgcactataatcaatagttattttccagtaacaccagggtgattaactgttagaaactcatcactatcatcagttgttacacaatcatattgaaggagaggaatatatgaataagtcagtagaggctagaaacctatctgaaaaagtttagtagccattcctaatatagtacaatctgagaaagcgaactaggaataaaaataaattacttaaacataaaggccatatatgtgtacacaaacacacacacaccacagcaaatatttcctaaaagacaaaacactaaagccattcaattaaaattaggaatgagagaagaatcttacattttacaattagtatttaatattatcttagaggttcttgtgagtggagtaagacaatgaaatggtcatatgtctagaaatcgcaagagcatctagtaaaaaatctaaaatcaacagaaacaattgtcaaggaagctggataaaagataggtctctagaaattatcttttctgtgttttgaagataagcacctagaaatggaagttaagtatttctttcacaatagcagcagataacctaggaagacattgaactaatacctgtaaccttcttagtgaagaatgtgaaatataatctagagaaattaaaacatgtaatgcctgaatgtatcttattacaaaattaataagtaaatttcttgtgattccggttagaatttccaaagtggtgggttttctctttaattgaataaaataatcctgaagtctttatagaagaataaatacgtactacctgagaggagccaagacaaatatggaaaagaaaaccggtgagggcagatttggcttacaagtaatgacaacatgctaagaataagaagtcttcgtgatcaaagcaatgtggtattgatccagaattacataaatagttcagtggaacagactagagaatctaggactgtgtctcattaagagagtgaatgtataacaagatgatagttcagtactgttgaggttggtactggcataaccagttctttatctggagagggggttgggggaacagcacagacctctatctaatatcataatcagtaataagtcccggaatcttcaaacacttaaatgtaaacaagcaattcaacttttacaagaaaatataagaacctattttgtataatcttggagtgagggagaatggttaagcaaaatttgatacgcacaagctataaaaagagacacactttgaacatatattttatttttatttgtttattttttgagacggtctcactctgtcaggctggagtgcagtggcgcgatcagggctcactgcagccttgacctcccagactcaggtgattctcccacctcagcctcccatgtagctgagactacaggcaagactcactgtattagttctcatactgctaataaagacatacctgagacggggcaatttagaaaggaaagaggtttcacagtttcacatggctggggaggactcacgatcacgggtgaaggtgaatgaggagcaaagtcccatcttacatggtggcaggcaacagagtgtatgcaggggaactcccctttataaccatcagatcacatgagatgtaattcactatcatgagaacggcatgggaaaaacctgcatctgtgattcagttacctcccaccgggtccctcccgtgacacgtggggattattacagttcaaggtgagatttgcatggggacacagagctaaaccatatcagctaccatgcctagccaattttttgtggagacgaggtttcaccatattgctcaggctggtctagaactcctgttctcaagtgatctgcccacctcagcctcccaaagtgctgggattaacaggcatgatccaccatacctagcctgaatatatatttttaaacttttctgtggcaaaagatacgtgattaagtcatagatcaagaagggatatttgaaacagacatggggttactatctataacaaaaaacttacaaattgttaagaaaaccacagaggaaaaatggacaaagaatgttaatatagaatacacagataacaaatgcagacagctagctggcaaacctatgaaaaatagttcatttttgctagggaaatgcagattaaacaatgagacgttactttaaacccatcagattggtaaaaatagagaaaaataacactttttgatagcaaggctgtaatagaagtggcaagtggtattatttctcataatactgatggaaatgtgaattatgggcagttgggaaattgaaaagcagatgggcaatgtatattaaaataaaaaactatcatacctttcttctaagcaacctttgtcctcggttatttgtcttttagaaataaaaaatgtgtgcaaagtcatatgtataaggatatttattgtaccattatagtggcaaaatactgaaaatatgaaaacccatcagttgaaaaacggccaatttatggactgtttgtaccatgtaatattatgagagaactagagctgtatgagagttggctgtggaggaatttctatgagaacttgatgaatgagaagcaatgtgtagaaaaatgtataatatccagttctaaaagacgcattcctcctgtgcccatatgtgtaaatgtgtgagtgtggagaacaagatgaaaatgctcattctgtatgttaagcagggagtggggtggaggttaatgtggaatggtgggagagtggggtggcagggatttccaagtcactcaccagtgatgagtgttaaccacatccccatttttttcctatgaaggaagctgcaatgctgtggtttgaggttaaacatgctggctccttctcttaggtcttgatttggtttttgttgttgttgttttttttttaattctagtctgttcttgttttgctgtgctgatatcctcttagattttacgagcatattaattgtgagtatttaacattcttctttggtttattctgagaccccgtttgcctgccctttggcatcattggcagtttttggtggtctactggtcttcctgtttgtgcctctcgtttgcccctttttcactggaatgtgccaggttgaagcaatatgtagggcccggtgggatgggccaggaggtggcctttcagatgtggctcctgcatggccctgcttgctctcttgagctgcctgcacttcagtcttaggaccacattcctgctttggcctacatgaagtgcaaggtagcagtgggaaaagcagagaggaaatgaagcttcctgataaatcacctgatcgctgccccagggttagtcactctagcccccttggatctcttgactccatctcttgatttgtttcttttgaatttctggcatctggagaatacttgtacagcagcagtcccctggttttgtttttctttcaacccaagcccatcccatatctgttcatgtgatgatactgtgtcttattttcccaagattcttatgactgtgatatttagtctgaatcagagaaagagagagatagaaatgtacactcagagggccacttggatggaaacttctgttgatctctccaagccttagtgggatcatctgtagagcagggataataacagcgcctatctgttactgttagggttactgcaaagattaaaataggtggtgctcttaaaagacttagaacagtgctgtcatatagtaaggattccataaacattagctgctcggtttgtgtgtgtgtgtgtgtgtgtgtgtgtgtgtgtgtgtgttttgttgttgttgttgttttaaacgggatcatgctggaaatgatagattgcaacagagctttggggttttttctctaattaatagatctaggatgttttctgaggtgtgtcatgtttttaaaactctgtggtatttctgtttctttctttctttcattttttttttttttttgttgttgttgttgagacagagtctcactgtgtcacccaggctggagtgcagcgatgccatctcagctcactgcaacctctgcctcccaggttcaagtgattctccttcctcagcctcccgagtagctgggactataggcatgcaccaccatgcctggctaatttttgtatttttagtagagacagggtttcaccatgttggccaggctggtcttgaactcctgacctcaagtgatccgtctgccttggcttcccaaagtgctaggattacaggcgtgagccaccgtacccagcctggtgtttcgtgatatatctatgtgtgagggtttctgtagttaagttcccatagttgaattcctggttcaaaggacaagaacatttacaatgttcatagacgttgggaaattgccttctgtagtactgcactagtttccactggctgtagtggttgatgagagtaccagtttttccctagttcaatattaacccattttatcagtcttttcatcttcgacattatggaaggtaaaaacatctcattttatgtcttcagtcagtgatgccaagtatctcttcgtgtatttatatttccatttttatccagtgccaactcacatccttctgtcaatttttcctttgacctattaatttttcattgataagaattctttgtaaaatgggcagtttaactccccatctgtcatatgttttttctcatttgatttattgtatatcttgtatagcaccttttaattttaacattgtgtttttaagtgtcttttctttgttgacttggaaagctaacaactacttacagcataatttccttctgttaaaaacaagaaggaatttccccactctaattgtgaaaattatacatttttctaagtctgaaaaaaaatagaggaaaaaacagaaaaaacaacagaaagaacatcagtcactcttaatattttggcattttccttttagttgttttttaggagagaatgtatatttatacttcgcatcataacatagatatagtctattttggtgatttattccaatatgtaatatatgtttctgaatgtacaatatcctatttatcatatctgttaagtttgtttccagtttttcatttaagagagaaaggtactgggaatatctttgtgcaaaacaagaatttttttttttttttagtcagattctgttcctatgatacctccctggaaatgggattcctaaattaaagaatattaggatttaaatacttttggtatagattaccaatttgctttcctaacgtgtggtactagtttatgttgcaatcagcacaaagactcactgtgccatttatcatcagcagagaagagagcagccctgaagatttgggggaggagtgttcgtagagaggcacgtgaaagtgagtttgagaggtttgagaagtagccaggtcagtggggctggggaagggagagagttcatgggggagggctggagatgaaggtaaaggagccatggttctttagggctgtgtgggtgctggggaatttgcatttcctgcttaaggttgtagtaagtcagcctggagagttgcaagaaaggagtggcttggtgtgatttattgtagcaagtgagagtgacccagaggccagttaggaggctgttgcagaggcctgagtgagagaggatggtttaaacaccaaaatggtaacattcagaatggagaggaggagatggtgggagattaaatttggggatggagcccttaggatctgttgattgactggatgtgtaagagagaaagggaagagcagaactgaggaaatgtcctcttgaactggctgggggccactgagatgggacagatgcgctggggagcagtgcagaggtggaatcactgctccttttaggtctaaggcatcccttagatctccaagtggatgtgtgaagatggtggtagaggagaatggagctcaaaagaggggccagagtcatttccatttagatggtctttacagcctaaggaactggcagatttcactaaggttgaggtctttctttcctgtgaaaatgtgatcaggatcctaagtaacagccctaaaaattaaacattaggaatacaaggtttcataaattaggaactgtctgtagctgccagattctaaatgttttgaggatacaaatcttggggtcttttcaaatgctttgagcagaagaggtacatcgtattgtgtttactgaatggcatttaaagatgcaggagacctttcccccttcttgatgaaacaatttgcctttcagatgttttgttatagtgagttgattgtaggaccttatgaagcatgtaaaccacacatttgtaaggcattggaagaaaaagctaacgcgagttaggagggatttaagaccatgtgaggaaattcaagcctatgttgttatcaccaaaccttgcctgtgttatgtaaagatttttgcctgtgtcatgttatcttcgttgtgttcaatttattcctccccctccaagtgtcctagtttctcctctactgtagctggttttgaacaaaatagagaaacttgggtctcctctaccctcagcatctgaattcttctcatttggttactcactgtgttaaaataagtgatatagtacattcttagcagtttgtttatttttaattttattttttatggggctagggtctcgctctgtcacccacgagtgtggtgccatggtgtgattgcagctcactgcagcattataactcttgggctcaagtgatcctcctgtcttagccccacgagtagctggtattacaggtccatgccaccatacccagctaatcttagcaatttttaaataacttttttttccgactgtaacagatttagatattggaaaagataaaacataaagcattgatctacctgtagagccaaatagccacagggatataaattggttaccatttaattttatttccatctatatttggctatatttatatttatgtatatggaaatagtttatgaatttggaatcatactatgatattttttagaatgatgctttttaaactattttatggtaagcattttagtaaagctcgtaatgttatttttaaaaacgtacttttcgaaggctgcagagtatggataaattcatgatgactttttagaggaaaatatcaagatgatctcactaacaaatcctgagattaaaaacaaaagcaaacaaaatacaaaaactgaaccatctttggaatactatgaaattcagattttatgttcttaataaaatcctgttttgaatgaaatcagtcttcatgcttttcttattccttttggctatgttgcctacagttgaattaactgtttttatatacttcctttgctttgcattgaaacaagctgatccattgtgaccctttgtggtatttcataaaaccacaccctaaaaactgcccagtcttttaagtgtagtcaacagtattgagcaattttttgggtaatattgtcggaagtgttaggtgccaaccaacaatggcttattgcttacatttaagtgtaagcaatatacaattaaaggaatgtcatgactttttaacttcattttgaaatttgagtttagaaaaaattccaagggaaatgagcaagaatgaaagcatcctctcctactgccagacttctgggagacccacccctggtcttcccaggtgtctcttcagtgaccttgttggtcgttgagggctgtggaaagttctagggaggctgctcgtccctcctctccttttgcttattgcattctgcccagattataaaactgaagtatctgtcttaagacgccagcagctttttcttcatcaaatccagacacatcgaatcccccacaaccaagaattacccagccacaaaatgtcagtagtgccccggtaaaagaaagctggttttagacttagtctcagaacctggccatcttccatggattatcccgatatgtgcatccttgtctcttttcactatagcctggtgatcatggtggcagttttcattttgggacactggtgaggttagaatagcttcaggcttccctcagtgaatagtattgtgaaggcagtggtggtaacattgtgttggagctggtgtgagggttgaatccactctgtagcctctgtccctagatcatggcgctgctttgattgggccctaattttctcctctagacaaaaggaattgaactaagacttccagcattccctccaggcttaacattttttcatttggtgctgatggtcactgactattttccagttacattttaatgcaagtttggcagaagccgatttctctgggttagggaaaatgacataggtggcagggaggtggatgtacaccatttgtttgatcagtttgcctagaatggaggtggcagaattggagttggaaagatcaaatgtagcctttttttcccttccagaatgaggcttttctatgcatttttttgaggcatgagaacctcatgggacaaggcaaaagtgagcatactcaagtgaagtgtatggttatgggggaatggttattagaaatgtcaattgtctcaattttttagtattaattttcagagggaaacagtggtgtaattagtgttgtgattgtttgccagggcggtcgtaacaaagtagcacagactgggtggctcaactaccacaaatttgttttctcagggctctggatgtccggagcctgcgatgaagcaggattggcttcttctgcggcctctcttcttgacttgcagatgctcctctgggtcttcccaggtcatttgtgtacctgtgtccgtgtcctaatctcctgttcgtataagggcacagtcatattggattgggacccacctactaacctcattttaacttaattacctctttaaataccctctctctaaatacagtcaccatctgaagtattaaagacttcaacttaggaattttgggcaaatacaattaagcccatcacaatcaggtaacatttggtaggacgtgtagatgctttttatctttaagggaataggcaaatcgttaaaaataaataaataaaaacttgttcaacttgtttaggtacattttcttatagtgtattgtggttcttatttttttaaccttccagctagtgtgtaaattggaaacattgtagcttaatttgatagttttagacataatcaaagatgatggaaatcttgttcttaaatttagtctattcagcaacttgtgtatcctcaactgctgaagactgaaaacttgagatgttcctcttgttttaagaatttgactgaaaacgggctgggcacgatggctcatgcctgtaatcccagcactttgggaggccgagatgggtggatcacttgaggccaggagttccagaccagccttggcaacatggcaaaaccccaaaaatacaaaaattagtggagcgtggtggctcacacctgtggtcccagctattcaggaggctgaggcacaagaattgcttaaaccccagaggcagagactgtagtgagatcgtgccactgcactccagcctgggtgacagagtgagaccctatctcaaaaaaaaaaagactgagaatggttggcactgtccccctgtctccaggagggtgaatgtttctagctgaaccctggtgcccacttgctcctctaagccttcagcagtcctcccagcctcaaggggtgatccgttcatcttccccccacctctggaaatcccagcgtttgaacgctggggggaactgcaagtctagtttacagggtttctcagctgagatgccaggaacacttcgcgagtgagcatgccaccacatttgagtgcatatagaaagttagctgtttgctacaactggggacacttcctattagagccgcatctgctggggtggagggctgcatgggttggagagtagggtgtgacttcttccagcaagaggaaagagaagtagcatagtgcccatcgcaggcagagagcacatgtttgacttgctcttggaatttctgtagagtaagggtggtcaggttgccagactacccctcaaacgaggacatggtgctgctgggtcccagggtagagctctgctggcaccttcaaggccctgatttacacctaagggcacacaactgggatctgaaaactgggatgcacagtacagactgcagatttacagggcggggctgtctctcatctgactattgattcttttgggggctgtagtttgtatcatagttatttttgttcctgtttttttcccctcttcaagacaataagcttttggagggccaggaagttgtgttcccatctgccgagtgtggggcctcgagggccagaacctcagaatgtagaagctgagttagtttgtggaagggtgaagggctgacctctactgttggaaatgccaaaatctctgatctggctttaaataagcaaaacagccccgccagacatagagtcatccacaaaacctcatgacctctgttattgcccatcctgtgtggaagcccactgagaacttcacttgaagatgctgcaggaacaactgcagggaacctggagataaggccccgggtgatgatgtaagctaattgctgagctgggtggagctacttaaccttatggtaggaggtggagcttgacgcaacccccttttccaccaacaagcatttctttctacctgtcattgaagtgaatcatcagtataagtagcgagctgggcgcattccttctcagttgtgttaaaacttgctggtattcccccggtatcagcagaggtgtgtacgggcactgctttaaaactgggaaggaggaagacgaggccagggagccggagggtcaccaaggtagatttccagcagcgctagtccagctgaacactttccagccttgtttttcagcagctttgaggaaaagtataggtaagaacaaagacaccactgtatgtttgctatatgaatgcataacatctgttcttggtgtgagtttgatgttggtttaatactgtttttatgtcagcggcatagttctagcatgtaccaagattttcaattttaaatgctttttggtgttcacagttagctataattggtcaattttaccctccttatgcataaaaagaatgataggcaaagaatgagccttgaaaagaattgggatcagaattctggtcccctgttctttgcttcttaactttcttgactgtttagaaaaatgtacagcttttcttccaaaaaccaaagcaataatacttttatttttgaaaataatggaaaacagagaccgctgaagttctatgaatgaggttttctgttttagaaatcacaggttgaggaggaaagaattgtgttttccttcctgttctgtttcgagtctcagtatttctgacttagaaacctcctggagaagagggagataccagctctcctttgtttcaagtaaaataccatcttaggtcataaaatagtttgcttggagaataattcatggcttatatctgaatttttggttggtagcaacagaaatctttctcttcctcggtatgagtaatttggcttacatgatttagactaaattttattatattttttgtttgagaaaacaaaagtcaaagcccagaacatattcaactgagtttttccctcaggttttctatcattttcccacccttcctactcatacatgtgaatatgctgaatgattaacatgtgatttttgtttctttactgtctcatttcatggtgattcataaactgttagttaactggttatagtgtatccatatgttggcaaagcttgaaataaatttgagtgcaggccacaccttcgtattaatgagccgggttactttcagtaaagtatttctgatgtcattaagtgttaagatggccggaattctaaagacaataaaaatgtatcaacaatatgaaatatcaaagcctacagtcaaatctgagttattctttagtacttatttcatagctattctttaatgtttattctttaatacttatttcacattgaaaagtactttacacatgtttgaatgagatattgccagtgaaagaaacaaaaggaagcaaataactctataagggaagtgggattttaaagtatgtttgtgctggccccaggctggtgagtgagtttcattagcaatgaccaggaagagaaagaatgccacagtggtgggtgctgaccttttttttttttttttaaaccttttttaatgtctgtaaggaatacaaggtgaactttaattcttgtgggaatctagtaagatggaagtcaagaagagaggaagaaatgctttttatttagttaagaggaagtaaacatctgtattagttacagatgttatgccttaacctttttcattcctattgtttttatgaaaatttgcctttttaagttaaatgaaggttttctggagtcctgtattgcaactaaatgttgatttaaaacgacacatttgggacattttcttggcactgtggaatataatgaaaagatataaaatgaaggcaggtatgaaattatatgaattctgctacttgagtgtagaagttttattccaaagtggtttgtttggtggatgtggtgatggtggggggctctatgtacttattaaggcaagtgatgggacaggagcttttgtggtcttgacggttctgttgggatgggagggttgtttgggatttttatgtttcattccaggcaatgtttattttttcagcctgtacttcttagggttttaccaagtcagttttcatgtgaagccattttcatatcgtttctttcaccttgatggaaatcttttccttcttatgtgctttgagttaaatatgatgtagtgtgctagtaacatagacggggctttcctttctacaggtgggcttgaagtgagcctgccactcgctcaccttgaatcacggaggtttcagaggccgttggccttcagggcaatggcagaagcacgtgttctctgctgttttctgagtctatcttgactgcgttcccagtggcccagaattccccaagggtcactcgacacaccctcgtctacagtaaatatttgtgcttcctctgtgcctggccaggttttctcagtacccaggagcacaggtgggcagtgggatgtgggcaggcggtacccagattccctcccacaggggccacagggaggacttgggcgcttcctgccaagagccccctgcccttcagactaagtggaaatagagatccgggagtccagtggactcagtggagttccgtagaatacatggaaaacgcaccgctttcagtgatgtaagctgtcttgttcacttcacgattactcatctggcctgcagcaggcaagaggatcacatgcaattataaacagcctcctctgactaaggtcagtgactggaaaccctgtcacgttatcagaggtcatttggtcatagattcttgggcagaagccattgagagtcctgggggtgtgatctttgagcctttgccagtgctggggtttgactccttttagctcaattaactgggtccaggagtttattttggccgagatctgccatgctgagttgacaggcttgacactggaaggaagtctctaacttcattagaggaaatggcgtggcaggctttaaggcattttgatatactccactttttctctcttgccctgttttgttgaggttttcagggccataactgtacctgaggttaatcagtgagtgatctatctgaaaggaatttgttctctttgggcaccgtcctgtgtggtattatatttgtataactatttagcttaactcattcaaaaggctatttaagtcacttgtcctgttcattacttgaaaacaagttgtcttctctttattcttttagtcagttaccaaatatttcctaagtgtctcttgtgctagacattgaggggcactccttctccctttcacttgtctgtttttgttgagctacattttttccttaagtcagattgttcttttcctgttacttttgttttcacttgatttgtttatttatatttaaatatgtactttaacagtcttgaagcattggtctgaatgaggatggtgatcagattgggaaaatgccccttaattttggtttaaaaaaatttattttctttaaattatttgtttattgataggggccacccactccaggtgagtggtttctctgtgtgtatggcagaggaatgctctgtgtctggaaaaaaaagtcacttagcttgaaatattatgaaagctgaagagtacaaatgtcagagagaaaggggtattgggggggaagagaatgagaagacaagacacagtcagggccctgtcacccgtgtggaactgcaggtccctggagagatgatgcatttatccctttttagagatattgccattaaaagttgatcttgagcatgacacagaactgaaagctttgatgacaaagccagcatctcagtttagcaataaccaggttagggaaaaaaccccagaaactcaacagtgagattcagctcagcaatgtgggcggggaacccactgtcccgccttgggcagggagcagccccagccgcttcatctgcctgatgctgggttttatccgcttcacaattaaatttcctttttgttatgcttgcgcacatctatatttggctttgcttcttattttttaagaaaggggagaagtgtgggcaaggtaaaatacagcttgcaagctcccaaatggcaaatgcaccagttagagtctaagtggcctcccaaccttaaggtgaaattcatttattcagcaaatatgtaccaagcccatcagggaccactgctcgagataccagtgcaaatagaagaggccaagggcacattattaggtccggagccagtggcctgcacagccatctgtgaccacctacctctctgcttgcagggaacttcagcctggtggaggagacccataatagccaagtcaactgataatagaattagtagtagtgttgagggacataaagaaatcagggtaaggccatcacaattacatgggtggatgatcttttataaaacagcacagttttgttttcttctgccatggtatctcctaacattttccagtgtgtctacttgcagttaatatggaagttgcggctgacactaggttagtggttaaaagaaaacaagaaaaccaacctttagaaatctttagaaacatcattatcatagaaagctataaactcttatgtatagaagggtaagtggccattgatcttggagcagaatgaatggatatttcctggaaaaaaatatttccactcatcaaagatactcaagtctcttctcatctaatcaatattggaaactaggaatatccacgcctatggaatatcctcagagagaattaattattctgccctctaagaggtatagtagtttagacttagaagtaaaggcctgaacttgaggctgcaccattgaaggcaaaagtgccctttatctcccagctttgtcatttgccaaatgcaattgtgttaaattaagtgacctccaatagcagagctctatgttttctcccctgacccccaagtcaaaattgattatagtaatccatcaaaccaggcctggcaaatgatgttttgcaactaaaggataaatactgagggggagggacgaatgtgaacgcatatgcagagcaacacagtcatgagaccattctattacttcctaaatttcttaaagcttttctgtcttttctgagcttctcaagtgagcaggggcatgagttcctgtgttgtgcctggggacagggaaggctttgggacctactgtggtcttaagtctgagcagtgctaatagcctcggctcaccaagtgctgggcactgtgctagagggtgtacaaacctctcatctcatgaggcctcactgctacagctgacagagatgacatccagttgtttttagttgcacatggcagagctagaaaacaaaccagggtgtgtcagactccagagcgcatgccctctgtgatgccgctgtgttaccctagatcaaatcaaccaagccatccgttaaaaaaaaaaacctgatctttgtcaaatatgcaattgttatatttttgttagagtctgcctctccagtgaacgatattaatttccttcaagtggctactcacagatatcacaaaatcagaaagctgcctaccctgcagcctgtatctgcctccacgtccccacatcagtcctccttgctgtgcttcttgtctctttagtttttatcatcttctaacactgtgaactttagtaatttattctggattgtttgctacctgtctccccttggtaaaatgtaggctccgcagaggtagagcgttttgtctgttttcttcactggcatatctcaggtgcctaaaacaaccatgccagacatgtagtggtgccagtgacaacttgttgaatgaagaaatgggagaaaaaagcagaccccggagacttaggagggtctgtgtgagggagtctccaggcagtcttcctgggggtgtcctgaaggacctcctgatcgtgattttggtcagtgtggaggctgtggtttcttctgagctgtcagtatttggaggtgagttgtctgcaggtcacctcatcccacctttacacattagtaaaatggaattcgctgggtgattcttaggactgtgcggtcagtcgaattaccagacgtccctgcatgctctgtctaagggctggagtctgctttccttgcttctcttctagaaagaggtctgtccacaagggattagcctcgcgaagttcctactgttgttcattgacccagtgagtgttttacccactgtgggtttttcctacctaattgcccctctggttttcagtgttcaacatgctgcagttacgtgttctgctgtggttttacttagcttaatcctttattaattgcctcttgttcaaactccctaagagcagattatccttctctttcagcttctgctccattgctgttgaacttttttttggtcgtgacatcagaaaaataaccaagtgtgagtctgataatagcaagtaaggctattttatttctatccaatttaccccaaatttgagcagtattacaccttaaaataatagagctggctcttgcccagcatgtgaaaagtgtatgcttcacgatggacagatattttccagtatctacttaccataaatctcaagatttaccctaccccactccagccattacccccatgtcccatttgcctaacctaccctagggccatctcagtgccctgtaaagcaacctttgttgcagacccactgtgtgactggaatgtgatgcacacaagtgaccaaggcatggccctgttcgcaaggagcttccagaccaatagcagaaatggacacataagtaaacaactgcgctactgataggcttctgccaacaggagtggagcttgagggccaggaagccttcccagaggcactggagcttgttttaacgttacgtgcatgccaggtggggggcaggacatttctagcagaggagaaagcatgctgtgctctgagaactaaaagtcatagtcactccacttggtgacatgtataaggcacatggaatagggccagagctgggcagaccgtgtatgccacaatagttcgttgtaggttacaaagaaccagtgcagagtgggtgaggcataggctatttgattaataatttggctgcattgacaagatacggaaaaggcgaggttgggactttccgtgaattttctcctcaaggtgcttaatcagtgaggttgggatggccggagggggccctcatttgcttgcctggtgctcaagcctgaggtcctggcctttaatagtcagggaggtctgtgtggaggcagggtgtgagccccctccaaggaaagctgcagtgtgaaaagaggcccaggatgagcgttggggagtatccacatacaacttgatattcctaaagtctcagttctttatgggaaagcccatgcactcttccacacttggaattctttgcaaagtgagtggtatttgagcttctttagagtcttgctactcccaccagctgtactggcatcaccagggagcttgttagaaatgcagattctcgaggcgcggctcacaactacccaatcagactacattttaaccagatcccaggcaatccctgtgcacgtgaagtgctagaacactgctctgcggtaaaacgactttgctaaccatggaagagggtgatttttttcccttttcctttggtgttttttataggacctatttaccttttagaactttttcagaattatggactgcagaatatatacagtgtcaatgtcattagcaattcattagtgatatttggctagaatacatagttgtttccacacaaatgccatttcttacattgagatggcacatgtctggttaggacttgggctcatttgtaaggagccacgctgcaggtaggcatgctcccgggacattagttgctcaggtttcaaactgctgccccagcatagcagatggcacggtaacaaagtccctgtgcactctcacattgcctgcggtgatctatcacacattttgtcccctaataacctagctgggggggagctcatgtctctgtttgtgctaatgctcgctgtatccccaagtggcagtacttaatataattgtcattgctctttaatattatctcattccacgtcagctgcacaaaaatttgaggttaattacaatgaatgttttctcaatccttgttattgagagctgtttaatagtttattttgtatgtgaagattcatatctagattgaggcttatacaacttcatttaaagacagctttttcggctgggcgcggtggctcatgcctgtaagcccaacactttgggaggccgaggcgggcggatcgtgaggtcaggagatcaagactatcctggccaatatggtgaaaccccgtctctactaaaaatacaaaaattagctgggcgtggtggcgggcacctgtagtcccagctactcggaggctgaggcaagagaatcccttgaacccaggaggcggaggttgcagtgagccgagatcgtgccactgcattccagcctgggcgacagagtgagactctgtctcaaaaaaacaaaacaaacaaacaaaaaaggaaagctttttcaggttggaaaaatatcaacagcagacatgaaaaagcatgaaaaatgacgctaagaatgtaagcaactggaaacaaaaattataatggtgcatagtgagctgaagatctatatttaaatgtgaactcccctttcagtttataagtgattactaacagcctcatcaggtttctggaattaaatgttttattatttcctcccaaagttagtcctcaaacattagtatttcttgtgttcttttgatttgaatatttgtttttaacacacaaggatatcaactctataagtcagttaatatgttcatgcttttagttaatcgaaagtggcttatgatttcagtttttggtatcaggtgatgttgcggaagtgaggttcactgtgaagcttcttctttttttttttttaatcattttgttgtttctttgagtgtatgtgagcttataactcaagacactatgtgaaatgaccctgtgtttcctacattatagaaaagaggaaaatgaagcaagttcaagaaaattagatttatgtggaaaataaattctgcatctagttattcattatcaggtatgagattacaggcatgagccactgtgcctggtgacctcatttgaactcgattacctctgtgaagaccctgtttccgaagaaggtcaacattctgaggtgccattgtcaggtatgaggtaaacacactgagaataccacattttggcaactcagacaagactattttccaaacatgtaaccctgggaagaaggtaacctatcatagtgtgtgttaagaagtcaagcaaccaagaaatgttaattgaaggcccgttttgtacaaggttgcatggaaaagacacactagcgtaagacatggacagtggccctgagtgacgtgcagccggtttaggcgaattaagatttacatacttgaaaagggacaaacaagactggacgtggtgactcatacctgtaattccaacactgtgggaggtggaggcaggaggatcccttgaggccaggagtttgcaaccagcctgggcaacatgggaaaacccctgtctctacaaaaattaaaaaaaaattagccatgtgtggcagcatgcccatagtcccagctactcacaggggctgaggtgggagaattgcttgagcccaggagatccaggctgcagagattgtgccactgcagcctgggtggcagagcgagaccctatctcaaaaaaaaaaaaaaaaaaaagaacagaaaaggaacaaacaacagacacaagattccatggaaaagggagtggtctaagtattcagactgtaggaattcagagagtggagaggctggttattatgggggtgcttcatcctggggagttgagggaaaggaggtgctggctgcctggagcctggaagaatcaaagatttccaaggccatggggggaaagcatgaaggatgagtgaatagacaccagggctgagcaccctgaaaactgtgaagatactagattgacctgtttggaaaaccaaacagatgtggctgttattgacaagtggttttgtttttgttttgagacagagtctcacttggtcgcccaggctggagtgctgtggcttgatcttggctccctgcaacctccgcctccaaggttcaagcagttctcctaccccagcctcccaagtagctgggattacaggcatgagccaccatgcccggctaattttttgtatttttagtagagatggggcttcaccatgttggccaggctggtctcgaactcctgagctcagatgatccacttgccttggcctcccaaggtgctgggatcacaggcatgagccactgtgcctggccaacaagtggtttaaattggattctccatttcccacctaatagaaagtcggaagcatagggcaaaagtaaaggaaggaccctgtgttctgctggttaaatataacagaggtctgactccatggctattataggagaggtgcattttgttctatgtaaattatcttgatgtgtcccctgtgcctttaccccatgattatttagcacttttttctccacggtcacagggacagggagaaacatacacccataaaacagtgtcatctagaggcaaaaacttgtaatgctcaagcatgtgctctgacgaggtggggcagggtgtgtaggaacaacactctactaattattacagagcttgctctgcactctctgtagaagtccttcaatatccagtctaacacacacagtaacttaagagaggattttaaaaaatcaaaatgccctcagatttgtattggatttaaccaggctgagatccctgagatccaaatataataatgtgtcctttttggatgaatcagacacaagcaaaaatctccagtgtgtgtccagctttagaggtgtagtaatggattccacagttcacgctggtgggccagccaagacttttaatgctgatgtgggcttcattctttctataaactccctttcttcttgatagtgcatgggcccaggggttccaaacatgggtacctgccgtaattgatctgtgtaaccggagaaaatacatatcctatggcacccttgtgtcgggatatagggggcatcaccgtaatgtggctctttttctgttgattatagttttttctttctgtgatcacacaattgttttatcctcgcttaaaaaatttcaagaagtgcagcactcagaataacagaaaagtcaggtgtctggtggtttgtttgcacatttaatagacttgaagataaactctctaaacatttattttgcaagttgtttttctgagagttgaggggaaacttttgccctttggtctccctgaggaattctaggatttcacaggtaggcgtgtgttttggactgcaggctgaacgtggttggcagggtggcatgaggagggcacatattttaagcgttcttagggcagatccacgatcctttacctgccatttctaagtccaaaaagccctgaaaaccaaagacatctttacaggtttgtaggaaattgatttgagagcaaaacctgatgtgaacagatttgagagtattctaggcatcttgtataacacttcattcaatgctttgtgcctcttgctgcacagatattaacattcacttatgggccctgccccatcccctactggggatgctatgcaataatcagaataatcaaactaataataataataataattggaataatcactgagtcattgtattagtccgttttcacgctgctggtaaagacatacccaagactgggtcatttataaagaaaaagaggtttaatgtactcagttccacatggccggggaggcctcacaatcatggtagaaggcaaaaggcacatcttacatggcggcagacaagagagaaatgaaagccaagggaaaggggaaaccctgtataaaatcatcagatctcttgagacttattcactatcacaagaatggggaaaactgtccccatgattcaattatctcccactgggtccctcccacaacatgtgggaattataggagctacaatttaagatgacgttgggtgggaacacagccaaaccatatcagttatctttctaaagtgagacaaaaagtcagaattctgtaacacattttttcccaagcgtttccaaaaaaggttggctttaatggagtattagtttgctaggcctgccatggcaaagcactatgaactaggtggctaacaacagaaatttattttctatcagtgttggagtccagaagtctgaaattaagagtcagcaggattctgctgtctctgagccctatgggaatatcctttctggctcttctagtttgtgatgtttgccagcagcgttctctgttccttggcctgtaaatgacaatcttctcgttgtatcttcacatcgtctttcctctgtgcctgtttgtttctgtgtctacctttcccctgttcataagaacaccagtcatattggatcagggctcaacctaatgacctcatttctttccttttctttccttctttctttctttctttctttctttctttctttctttctttctttctttctttctttcttttcttttcttttcctttctttttttctttctttctctctctctttctttcttctttttctctctctttctttctttccttccttccccccttcctgcctccctccctcccttccttccttctttcttttaaaaatatttttcttttttttcccttccttcctccctcccttccccccttctccttccccttcctccctttcccccttcctccctccttctctccctccctccctccttccctccctcagggtcttgttctgtcatctaggctggagtacagtggcatgatcatggctcactgcagcctcagcctccctggcctaagcaatcctctcacctcagcctcttgagtagctgggaccatgggtgtttgccaccatgcctggctaagtttaaaaaaaaaaatcgtagagatagggtctcactatgttgcccaggctggctttgaactcctgagctcaagggatcctcctatctcagcctcccaaaggggcgagattacaggcatgagccactgtgcctggtgacctcatttgaacttgattacctctgtgaaaaccctgtttccagagaaggtcacattctgaaatactgggggaacatagttccccatcttataagatagagaatgggtcaagacgagcagctccattctttgtttgtgtttaggccagtgccaagttcaagatcttgcctcagggctttcctggtaccactgggaatgtgtatcagcagcagctgtgtcactgaatgggtgtcacctggggggctgcctgttcagacattagaagctgccacatcccctgttaactccatgtgagggaggaatcccttccctccgacaatttcgcctgtgagaatcaagtcagattttgcagtgagaactgagctgagtgtagaataagttcccgaggtacttctggcaccgttgttactcccccaccgagaagcccagaatgttcccaggtgtgttcaaagattgtacaggaagggcttaggacggtgcttggctcatataaacactcagtggcaaagaggttgatgcttaagtacacaggaagtgtttaccagtacacataattgtataccagtgagctccaccattcaatttactgtctgtccggtacattgaccctgtgaggcccactctcggtgtggcactgctaacaggttttattgttgcttactcacttgaaaagtgtctcccttggctagacctttgtcctgagcactggacacacataggtgctcagcagcgtccctctctgcaatgcaaaagggataccgtgtgcctctgcatgtcagctctagtcctggcatcccaggagcatacggtgacagtggaagtgaagcgcaagccgagtcctgggaaccaatgtctgccagaattaattaaaagtaagcatctttttttccctggttagttaatccaggatgaattccctgagtagttcctgccgttagaacttgctctcttttttagttagacacagctcggtgttgcctccactttgacatcacgttcatagttcctgtgcttggccagaactgttttcagttgcaaggacatgggtgagactggtcaaggaattgactttcagggttccaagggaataattagttcagaagtctgtccccatacttgttttccagtacaatctgtgtctctgtgggtgtttttttttaaggctgtgtgctttataaactggagatagaaggagccagtttattataaaaaggataaaatataattaaacaattaaaagtatgtctttatagccgggtgtggtggctcacatctgtagtcccagctacttgggaggctgaggcaggagaatcgcttgaacctgggaggcggaggctgcagtgaactgagattgtgccactgcactccagcctgggcgagagagtgagactccatctcaaaaataaataaaaattaaaataaaaataaacataggtctttggccaagtgtagtggctcccgcctgtaatcccagcagtttgggaggcagaggcaggaagatcgcctgaggctaggagtttgagaccaacctgggcaacatagtaacctcgtctctacaaaaaatttttaaaaattagccaggcatggtggtgtgtgtctgtagtcccagctactcaggaggctgaggtgggaggatcgcttgagcccaggaggtcgaggctgcagtaagccatgatcttgccactgcactccagcctgggtgacagagcgagaccctgtctcaaaaaaaaaagaaaaaaaaaattatgaagtactggttgggttaacgtttcttcttctaaccatgagggaagtaggtgggctgttctggtgactcagtgtcctcccagactcactcatgagaggaagtattcatggactgtggtgatcttgtcttggaatttttttctttgcctcctggcctcacagccgttccttttcttttacacatccatgaaagggagactctaagatcttccttgccaaggttgttgtagggatgagcgatgatgtctctgaggcaccaggcacggtgctggcacccagaagctgcttaatgatcctggaagttatgaccattgctcatagtttttcctacgtttcagatcatccttaaataattgtcattggctgggcgctgcggctcacgcctgtaatcccagcactttgggaggccaaggtggttggatcacctgaggtagggagttcaagactagcccgaccaacatggagaaaccccatctctactaaaaatacaatattagcccggcatggtggcgcatgactgtaatcccagctactcgggaggctgaggcaggagaatagcttgaacctgggaggcagaggctgcggtgagccaagatcatgccattgcactccaacctggacaccaatagcgaaactccgtctcaaataataataataataataataataacaacaataattgtcatttatcagcttcttcgagctcttaatatatatatcgccacctttcacaaaggcaaaatctgcattagaaacactgttgtctgattttggttcctctggaggaggggtagacagtctttttgtgggcagggtctgtgtctgtttacctctattccccgccccccactttggtgcccaccacagtcccttgtgtatggtggatgctccttgactatctgaggaataaaatcaattgtgaaacagtttccaaaaagggaacagtttttgtttccccgtttccttatagccttgtgagttgctatctctcttggctctattattaataacataaaagaaagagctgttttcttaacctctggtagttgcacatatatggggaaaaggcataagaaaatatgctggcaataaagacaagtcacagattgtcattttctttggtgactgaagggatatttcagtaatttataggtgaaattttcctttttgtgacttccactgaacaacatttttactaccaaaagataagggaacaaaattttttaacaaactatttaagcttaaatatttaaacatttttattagtcaccacatattaataaaatatttttattagcacatattttattagtcaacacatgtgtacacagctctgatgatctctatgtagatgcctatataaatagctatatagatatcatcagagctgtgtatatatgtgttagagatagatgcacatacagttgccccctggctcccaggggtctctgtgacccaaggttgggaccctcaagtgactagttatggatggcaaggggggctgcaaggccagagttggtcctggctagagatttcaagactcgagtggctgggaaggttttagaatgcaggtaaaccactagttgctccaaacaacaaaaccatcataatggaagcatccaaaagtgtgttcttcggcagcttcagagactatgcctaagcaataaagttttaatgtcttttttagctgcttaggtgaagaatgcatttgactgtaatctaacccattaatctcttatttttgctggaaaattgtacatatttaagagtagtggctcattgccagtattggtgatgagtgatatattttaaactatgcttcatacctttcagtaaatcttgggctgaaagatatgtacgttttgttttcaaaatttttcagtagtcatctatttaggtcaattttctgggcaaacaaaatatttgaagccctttagggtttgttattgagatgtaggctggccatgaaattacagggttcagtacctcattgaagtgtatatgtaactgttattagttttttgataacttttttatactcataaaagtagtacttgcttacagtagaaacttaataaaaaccataaatggaaaaataaaccattcgtaaacatcatatagagagaatgactattaacattttagcctaacatgattttaggggtttataatattctagtatatgattgtaccataatttatttaattgcttcccaattattggactggaagtttgcttctaattttttcttattatatatgatgctgtaatgagtaccttttaccagtaaatatttacctgcctctctgattacttctttgggattaatccttagaaataaatttgatgaatcaaagggcatcaaccctttgaatgcttctgatacttctgccatgttgtttcccagaaaagatataataattattccttccagtagtagagtattaaatgtctgcctctctttagaaagtattaccttttttcaatctttgacaatttgttagataaaaacttcagtttcaatattattgcatgtattcatggatatttttcttctcacacattctagattttttctatattgtttataaatgttttataagtgttattactttattgaggatagaaattattatgtaacacttgatggtaacagtaaaagtggaaaagaatgaggaaaccttcaacaaaacaagttgtcattaacaaaacgggttttgcaatgcaactttctgtgggttagctaaatctttagtgtgtcaggtagtcgaaagaaatttgctgtatagtgctgtgaaatatgctgcatccatgagccctctgctctttgcccatagggagcaaagacacaatctttttgcaagctgtcccagtgccatattgaccatcttccttttacagcaaaaagttattgcttcctttggttaaggttgggacacccctctggaggcacacttgaaaaatgaagacctttctcgttgttcttctgttatccaagtatcttggaagaacacctctatagcaggtagacaaggcagggtgtcattgcaatctggctgcagactgaatgtaatcccccttgacattttgccccttggaggcaactcctgccctcccctctccccttacgaccctgcccccttaaaatatgtggagctcagcaaagactatttattctgataaaaatgagcaaataataggtgtgaaagaacatggaacacttcagtgaatcaaatggagaggattaagcattaccccaataatgattggtcaggacgactgtccctgtggagtgtgtcccagaagggttgagcaatggagcaaacccagaaaatctcattctcaactctccctgacagatgacctcgtctgcgctgtcttttgcttcatggtgatgaaggtggaacaagacccttgaataagatttccatctctgaattctttaaacccatttgagatcagtgcaggcctgcagtctctctattagaactggagcagaggcccagaagagagaactgaattttcagcactggattctatgttgagaatgaaagagacaataattgaaaagcttttctcttggaaattttgcaaaatccgagtggatttttgaccaggatttcttggtgacctctcctgagagagcaggtgcctgaggatttcctgctgagtatcttggcatctgtcagactccttatgacttcattttagttcagggagtctgtttcctagccattgatttcatgcacaattcctggcatgtctcatatctctaaggtgatgtcacccttgtatttttttttcagatgtaatcttttatgtgacagtgaggtgtcttacttgtgagtgaacagctagaacctcccaagtggtttttcttttggattttgtttactcagtgaaaaatactgaggaacctgagatccttcagggtgcattttggtgtctgcccaaccttgacgtggatttggaggccaggctcaatgctcgaacttcttgttggagtggcactaaatcattaggatccctgaggacagacagttcaggccatcattatttggtaggcccttgcacacttacacacaaatgcatcattatgaacatggagcagaagattctagggccccgtgtgtaatggcacaatttgtcaagaggcctgagacctggagttggcatggattccctctcctcctgacccacctacctgctacattcagttggccaccctgttcttttgagtccacctttggatgagtagtcagtcctttctgatttttgccacctctgcattcagagctttcttattctttggcgcggaggccttccgttgggtcccactgcctgctgtcttatctccttctaatgaatatgatcatgatttttctgtatttagacaactccacgatgaggaggatgatggcggcagctaacatttatgtatgtatgtatgtatgtatgtatttagagacagattctctgtcacccaggtgcagtggtgcaatcttggctcactgcaacctccccctcctggattcaagtgattctcatgcctcagctccccgagtagctgggactacagatgcacaccaccacacccagctaatttttgtatttttagtagagacgagattttaccatgttgtccaggctggtccggaattcctgacctcaagtgatctgcccaccccggccttccaaagtgctgagattacaggcgcctgcctccacacccagccagcagctaacatttattaagtgctcactatactcctgccaagcactattataatttgtcttctaacaggctttttataagggaagtgctactattatacccattacatagatggtaaaactgaggcacagagaggctatgtaagtttcccaaagtcatgtactaattgatgaagacccagggtttgagctctgcaggaatggccgactccttgtggtttgagcctgggctccctctccatctgtcttttctccctgagccctcctgactgcagccatgccagactttttaatgttcggaaccccagctccagcctatcactggagctctgcctgtgatctttccacctcatgcctcccggttctatgtgtgccttcagactccatctggcagtggtatctggatggaccagtgcatagaaatcacatgagacactcaataaatgtagactcctagtgattctgactagcaggtctggggtggggccaggtacccagatttgcacgggaagtcagggaccactgctgctgactgcttttttcctgggtgcttggcacactctgtcacaatcatgttttcatttctctatgttccatttcaactggatagggacagtgtcttttgtttctggaacctgtctcttttcttggcatatagtaggcactcaggaaatagaaggttgcttgaatcctagtaccagtttactatctccttggaaagactgaaaggtagaatgtgatgtctaagcagcttcactaagcagagaaaacaaaaagtttgcaaaatagaatttgccttttaatctacatgttcttgcgtagcattgagcttcctagagagtcatattcatgctagccctgagttgtatcagcagcagccactagaacggtaacttgatgccaagagtgaattctgatgagcttcattgtgagtaagagtcccagtttgatcatctctacccagatcccgtgggacctccacactgtatgaataatgaggaggcgtggaatacgtagcatgctgcagttggccagcacccagtgtgtactgtgaggtaatcagtgtcaaatcagtcattgtagcaggagttgggagtcaaaaggagcaacagagaacctcacacgtctcctaagagaggaagcaaagaacagttaccttggctgtcatttatggggcatttgtattgtatgtttggaatggtgctgggtactagtattaatacatgattttctctggtctttgcaaaaactgcctgagttaggaattgtcattcccatttcattcatgagcaggctgaagttaagagtggttaagtaccagctgaaagggaggaggagcctgagagcaatctgggcacccgttttccccctcttcttatttatgaatgaatgaatgagacagggtctcactctgtccgggtctcactctgtcgcccatcctggagtgcagtggcacaatctcggttcgctgcagcctccacctcccaggctcaagcagtcctcccacctcaacctctgtggtggctgtgactacaggtgcatgccaccacacgcagctacattttttttgtatttttttgtagagatggggtttcgccatgttgcccaggctggtcttgaacccccgggctcaagcgatctgcctgcctcagcctcccaaatggttgggactacaggcgtgagccactgcgcctaaccctctcctcccctcgagcttacatcctactgtcctgtagccagctccaagatgttggcctttggttctctcttcaggctgaactctctttcagggagtttcctaatcgatcttccatagagttgatcataccttagtacctacctggatgagcactcaagatgttacatattcccacctgacttctttattactgctggaagatatggtgtcccacacctaagtatcccacccacagtccccagctgcatgtgtcgattattgtgagctattcaagggatacagactgaggtaaatgaaccaccagtggaagaatgtggatgttctattacaggaaatgcttagctctttattgcagttatataatagccggcaatcatgatagctgaggggcataaaaatgagagcaacagagtttatggtattctttataactgtggattctgtatgtgcgtgtgtgtgcacgtgtgttctgcatgcatctccacggcacattatctggaggtaacatgatcatcaggccttgagctcttttataagcaatagattgtggctggaaattgaaaatttagtttctgtagctagaaaatactcttttcaaatgccatctagaacagtagttctctgagtgtggttcctggatcaggagccttggtatcactgggaatgtgttaggaatgcagattcttgggttctaccccggattgaattcagatttgggagcggggcccagttatctgtgttttaatcaccccctcccccaggtgaatctgatatgctaaagcctgagcctcactcccctggaaagtgacgcctgattcatctgccagcccatgggcacccattaggaaggtgcttatgggagctttgacctgggctaggtgccggctcttgatccatctttttctaaggctgagggtgtccatagaaggagaagtaggtgcatccgcttagatgttatttaaccaaataaaggtttacagcttacagaaaagaggcaagattaactaataccttccaaaccataatgtaaaaaaaaaataaaaaatatttactcataatggagtataactgaacaaatcatgttgctaatttttttaggatatgttttgtagcttccattcagatacatcttatgggtaataaatacacacgtgaacacacatatgtgtactaacaatatttttcagacttttgattttttagatattgagtatagccttgttactaccaaacttttatcatacttccttgtgaaaggatttcatggcatatttattatttgaaatatcaaatagaaatcagtacagtctcagcattttaagatacttgatgtaatctttggaaatatcttagacattgcaaaataagggttaatagtcatagtatagccactaacgggcagttctgaaattacataaagttaatctgatgaactgatagcaatcagtttttggctatacataactagataagtgagaatttagagattgaatacatgagagccctttttatgattttcaggatctcaagtatgaagcaaaataaattcttctataccctaaattcttgcaaagtgatattttgattagatttgagctaccccagggctagcaatacttgaaagtgtgactagacttaacctcttagtagatagtccgcagtaatcctttgaaatatacatcttgctaaaagttcctttcccaaggaaataatgattaaagataatgtgatgtgtacaaggaattctgggacttgtagtcgagaaacctgaactttaatctagactactcaaatttataactttaggcaaatctctcttgactttctaggctttagttttctagggttttgttttgatttgtttttttatgtttttgtttttgtcttttttttggggggagggtgttgagacagagtcttgctctgtagcccaggctggagtgcagtagtgtgatcttggctcaccgcaacctctgtctctcaggttcaagcgattcttctgcctcagcctcctgagtagctgggattacaggcacctgccaccatgcccagctgatttttgtatttttagtagagacagggtttcaccaggttggccaggctggtcttgaactcctgacctcaggtgatccacctgcctctgcctctgaaagtgctgggattacaggtgtgagccacctcgcccagccttgatttggtttttaatctgtaaaatggtaggtgttgggtcacatgaacaatggctcttttacctccactaattacctagacgctagaaataagaatatggataagacctaaaccaaattttctagctaaattttgtaaagtctgaacaaaatctgtgtgcgttttaatctttcttgtaatcttttcagactctgcctttaaaattatatatatttttagcttctaagtaaacattattggcactggttttgataggaactttactccaagtgtattgacttagtagatatgttaaaaaggttattgcttagtttgtggaaataatacaagctgagactttaactgatatttgtattttcatttaggttccactgttttctcttttgaatgaaaagtataatcctattaaatctaaaatattttcttacagtgatccgtatgtgaaactttcattgtacgtagcggatgagaatagagaacttgctttggtccagacaaaaacaattaaaaaggtaggtgtcgatctttaaccaaatgtcatttaagtcataatttaatccaattatgcacagtcatgtgctgcttaacacctttttggtcaaggatggactacttacacagtgatagtcccgtgagattataatggagctgccatatacaagtgcatcactttttctcttttttttttttttttttttttttgagatggagtctcactctgtcgcccaggctggagtgcaatggcatgttctcagctcactgcaccctccgcctcctgggttcaagtgattctcctgcctcagcctcctgaatagcagggattacaggcacctgtcaccatgcctggctatttttttttttttttttttttttgtatttttagtagagacagggtttcaccatgttggccagactggccttgaactcctgacctcaggtgatccacctgtcgtggactcccaaagtgctgggattacaggtgtgagccaccgtgcccagcccactttttgtcttatatactggattttcattttaagtgtctttcagtattaaatctaaaagttttccaagacttttcagtactaacccaagatagtgattcaggtttttacttaaatgcctacaaaaacagtatcctgaaaatgtcataagttgtaacattttttcttgcacagaatacagcaaaaacaaggatttgtttttgtctttgtatgtttcacaaagaaacttaaagtaatttaaaatacatttaatgaaatggagctgtttgtggaattggtaggcacaccaggaatagtttaacttgaaacaactatttctaaaggaagcaaaatacttggttagctacatggaaatagagaaaatatattaataataaagctatacatgtatgtatatatcttattttcctaatttttatgtacatgatttcattaaaaatttgtttccataagtatgtcttttagttatttatttatttagtttgagatggagtgtcactctgtccacccaagctggagtgcagtggcataatctcagctcaccgcaacctttgcctcctgggttcaagtgattctcctgcctcagcttcctgagtagctgagattacaagtgtgcaccactatgcccagctaattattgtatttttagtagacgtgggattttgccatgttgaccaggctggtctggaactgctgacctcaggtgatccacccgccttagcctcccaaagtgctgggaatacagatgtgagccactgtgcctagccaataagtatgtcttaatttgcctatctccatgtatttatagacatatgtaatatatatatatgtaaatattttttaccctatgtttggaggctttattgaagatgcatgttctctattaaaaatacttggctgcatgtggtggctcatggctgtaattctagcactttggaggccgaggctggcagatcaattgagcccgggagattgaggttgcagtgagccataatgatgccactgcactccagcctgggtgacagaatgagaacctgtctcaaaaaaaacccaaaaaacaaaacaaacccctttcatctgtgctttagtatcatttatgggttactatgatttttttccttacctcctttagaggcgggtgcttagatagtctaacactttgctgaacattttctggacagcatgagtgctttaaaaaattgtaactgtcttgctgccatgcaggcacccaggatgcagccaggtccttttgtgtaaggaaccataactgcagcgtgtcctccacttggcattgggactggcattaaaaatctgttttgcaaacaggagccagtcttttgattagcagggaggatgcctgcgagggacggaggccattgttccctgtgttaggcgttgttgctggttcagtttctaggcgagtgggggctgtctagaaggctcaccaggaaggcagctgggaaacttggttgcctgctggatgtggagccaggaccaaagccggcgactggggctattgcaatggatttccttccaaagggaggtcctccttctccctccctttccacggtcgagggagtagctctgtagctgggtttgccctccttctcctgctgcccgcctcctggttcgtatgcctctgctgcgttcgggtgcgagaactgccgtcatcctcctctccttgccgtgttgtgactggttcttcgttcgttttgtgctctcctgtcttgttgctttcctcgcctgtcatttcccatgtgcatttccgtgaagctgccctccgggactgcagccagaggcaggccaggcctgctgctccactcccctcccctcgttcattaccatccttggcttcattcacatgggagaaaagtatgaaccccattatttaggattgaattcactgtggagttgtgggtggggaaagtgctgaatttttgaaaacgccggttcagtgttgtgtgagctctgtgtttcctatttttatgttgcactctgttgatttttttcatctccctgaactgatctattaaaggaaatagattgataaatatcattttgactaaaaatatctatcgctgttggtgaagtgatggtttttttttacatacaatttttaagagctgtctttaagaggcttatgcatgtgcagatgcatgaacacacatgtacagtcttccttcctagaacatgcttcctcttagttttgggggatatctggcagtcctttcttccatgctgaggacaaaggtatccttgccatctccttgtgagatgtacatttaagtagactgatagaaagatgaacagatggatgaatggagaggaagactgaaggataagtagacaagtattttttaacctggttatttttggagaaaaaaataattcacttttggcttacatttggtctttttttttcttgttataaaatctgatcctcagtatagctctctataaaatgttaagatttcaatatttatataaacaatgaacacattcaactttcccccacctgcttcgttactctgcaaaacagatttgtagcagggagagggaagtcaacaaagttcatttccttcttggtagaataatcatatcaatgctaatttcttgaagaaattttttatattttcacgatgactctttccaggcctttgatgtttttccttctggtgatagaagcagtttaaggtttcatacctatgaagcatctgtttcataaatacattccctccccctccagtttggtttgtacgctagtctcaaataatcgactaaatgcttctcttagctttttttaatcaaaaaaatgtttaagcaaatatgtagactgtattgtactagtaactgctaatgtttgaaagactaaaagatactacaagataatttctcttccagacactgaacccaaaatggaatgaagaattttatttcagggtaagtttttcattgtttggtaataattgttattgatacgtctaggtcgattatcacagtcaattcatcttgaggaaaagctcttaaatttttaatgagaaattccttttaggatgaaaaataggtagcctcctaatgtgtcccaaattttgaaagactagaagtagtggtcacagaatccggacttgtttcattggggagtgttttggagaagtcaaaagaaaattatccaaacaccatgtttcatcttttgaattcaaacctttctttaagaaataagataaaatatcatttatgagaatggtttaattctatgagacgggttatgaaatattttagagagagtaaaacagtagaggcaacatgattaaaaagaaacataaaaattaccagttatattctagttagggaggaaaattttggtaactgaaacacttgagtgcatatatatgtgtataatataaaattacttctggaatctaaatacaacagaattaggtaagatttcctcaaccttttatatttaatatttagaatagctatatgtcgaaatgactgaaatatgtgaattagcagagatttctgcttattgagcatttgtggttgttgctgtgttttactactgacattttggaactattagactgcttagctatttaattgaaagaaaggactttctcttcaaaacgaaggtatcttaattgtatagctgtgatattaaaaactgcttacctccagaaataatccaggtcttctgattagtgcagatttccaaaggccagtattgccatgaggcccattataattggtcctgatttcttcctctcaatcgcaatagtattttttgtgctccaaacttgggctactacatacagcatctgctttccattatgctcagagctgaaatatggcactgatactttcatacttggtgaaatcctatgtacagcctccaccagatgtatttgaaattaccctgtggaggactgaaaagctaataggagctgatagatgctgttggcctttagttaactctgaaatatagctttccacttgtgaacctccaaagtgtttagactcctttcagtggaacactggcacagttacataaatgttagtacatcccatacttttttcagctaatcttggcagtaggcacatttaagttctatttttgttagtttttctgaaggttttttttgtttgtttgttttgttttgttttgttttttgagatggagtctcactctgtcaccaggctggagtgcagtggcacaatcttagctcactgcaacctctgcctcccaggttcaagtgattctcctgcctcaacctcctgagtagctgggactataggcccgtaccaccacgcctggctaatttttgtatttttagtagagatgaggtttcaccatgttggccaggctggtctcactctcctgacctcgtgatctgcccgccttggcctcccaaagttctgggattacaggttcttaaggtctttatatttattcattttacaaatctttattgagtgcctattatgtgccagctcctgcctgtagcctgtggttgcattggtaagcagtgtgacccttcatagagcttctaaacagatagcaaaccccatctgcttgttctgtcgctaggctgcaggcagaccacggaccagaagcacaagctgagctctctgtgcttgtatggtcaagtgttatttcatgcattccccaccatgaagcagccagggcctaggtcacctctctgctttaccatttagagcctttgtgaccctggaaaggccacctgaggactctcaatctccctgggatccttatctctcacataggagagagaatccttacctgcaagggttgtttcaaggatttgcatgcgatgatgtaaatgagaacatgtagctctatgtcacacatgtggttggtgcttagtaaatgatacctgagtttggaagatgatatgggccattttggtgaggttttggtaaggaaaaggaagcaaaaagatatggaaagcccagtagctctgtcattgcctcacagttccaggtctctctcatggttcacagtctaggctctggagacaggcagcatagacctagtgcaggtcctggttgccctacacattagctgtgggctcttgggcaagttacttcactgaacctcagggtctcggctcctcatttataaaattgcgtgatagttatacatcataggattgctgtgaagattaaaggagatcatgggttgttgatatttaataacaagacagtgcctaaaaagtaagtgcacaggctgggcacagtggctcatgcctgtaatcccagcactttgagaggccaaggcatgcagatagcttgagcccaggagttcaaaaccagcctggggaacatggtgaaacctcatctctacaaaaaaatacaaaaattagccaggcatggtagtccaagctactcaggagagtgaggcaggaggatcaattgagcctgggaggttgaggctgcagtgagccatgatcatgccactgcagtccagcctgggcaacagaacaagaccgtctgtctctgtctgtctgtctgtgtgtttgtgtgtatgtgtgtgtgtgtgtctctctctacacacacacacacacagatacattcttaagctattacaatcttcttcattatttttatcattactattactgctatcaggactaagaaatatcctcaggcatagacattttttgatctacagtcatgagaatgccttgtacagaggttaggaacccgtcaaagctatttacaactatcctttcttattttagaaaaacagctaagagccttctcttcttttgctatgcctaaatttggggcagaataatatagaaatcagtaataggaaatttgatttagtacacatagaattcccagaacagcaggataattgttcatattatacaattgagttgggcgcattgtaaagcagtatgttattctttctgttccttacgtcgctgttcaaatgattcctgctcgtttaaaaaatactatttatgttccttataggtaaacccatctaatcacagactcctatttgaagtatttgacgaaaatagactggtaagtggatgcctgtatttgaattttgcttcatttttttattaactggattttcagagcagcgtctttaaaactctgtgtttatgttgtacttaggacagtatatgtgcccaaaaagaagactgtttttgtcccactacgagtttgatgttcaaaatcctaacaaatagttttatgttgctaggataaaaaatgtatttgtatgtgtgtgtatttttattgcagttaatgttaacgaaagccactggtgatagtaccagcccatatgctcatgctctaatgttgggaatacagaacggtaggcagatctctaaagaggccatcaggaatgtaaacaaactttgctcggtttttaaatgaaagccagaccatagtactgggatgcattcagtagcaaatctatggtaattctctcagggaaaataacaatctaattaacaacgtatagcaaaaagtgaatctacatttagcaggtaaagtcaagccgtattttaaaagtggttgccttcttaagagagaaccttagaaagtacctttaaagaaacaaagatatgcctgaggcatataacagatacaaactaacattttatatatagattgatgtatatataatatgtttatgaagatcgacacatacataactgaaataattatgatttcattttattgtttttaattttttttagagagagggtctccctctgtcacccaggttggagtgcagtggtgcagtcgtagctcactgtaacctcaaacccttgggctcaagcaggactccaggatagctaggactacaggcatgagccaccatgcctggccagatttcattttagaaatggaatttttgaagcacattttgctttcttaactatctaaaacgtgtacatcaagtagctgtgaaccaggtgttccaactatgaaaatgaacactatcatgttaagtccttaaggtaccttcagaagtgacactataattcagtgcagtcattctcaaatttaccctctctgaaacttgtatggtatgttgactggttaaaaggtgttcttaagaatcctttctgcagtattcaattgaaactccagatttttaatagctggacgttaatagaatatttgaattggaggagccttatacaataactcatttaactcctgttgttgtcgatgagaagaaccaggtctagagcctttacataaacacatcagtcagtggaggtgccagggtctgacctgctggcctcctaagtcccagcccagtgatagtttgggaatgtattgaatctcatatgattagtattattctccaaaagagaaaactaacagattttggcctaccatcctagtatcttttccattaaagtatgggatgttgggtgatgaacagtcgtacagtgtaactaaaccacttttgttgtatgcatcaaagtactttcttgtgaaattggatgagagattctgctgagggtgcagttcttgtctctccatctctcatccagtgaggaccaagtgagttaagcagtattgagtagtataacagtacgttcctggagacatgggtgtgtctgtagactaatccttattctccaattattgagtataatatctcttgtttaacatgaggaaagggtcaaatttgaggaaaaatggcctcttgtttgatgtgttttagttcattattctcttctattaagagaaattcactgttaaaaaattgtttcccatttccgtatctgaaataatgactgtagttgaggtgatcttgccctgggtctgaaatcatacttccaaaccaaaaaggactttgaatacaaaacttttaagaaatcttgtatgaatacaagctatatctgaaaaattgtgttttataatattgatgcctagttttgccccaggccatctgcagtgtggttactatgcaaagaatgctggtgttgctgtttttttttttttctttgttggctattaacccagcggagacaatatgtggctatggtagtacttggaagttctagcattacacagactagcttccatttctctcatagaggtcatttttggcatttaaaacacatacttttagaaaacagatttggatgtatgtaaacacagggttaatccaccacactctggatgctagagctgttgacaaagtcatgctttgcagattttaaaataaactttttgttactcttacagcttggtattttcccctcctattttttttacctcctctaaataaacctctttgttaaataattgatgtttctggatcatagaaaatagtaagtttaaaatacagaatatttccaagctaactacaaatctgatgacagttttttgagtgtgcacttttccttttatttcttaggtcctttttggtcctttgcaaacatagtaagattccatatttgtgtcccaactgtggtaatattgctgacttcttactggaaaacagtcagctctaggtagcatttcttctgtgtggtatttaagttaaattattaccaaaaaaaaaaaaaaaagcccacatgcactcccttcttcaattttccttttgttttttgttgtttgtttgttttttggttgatgttttctttcctacctgacatatggaagacaatgttttctccagctgggttcattttctctttgaaaaggagacactttggtgtctgccagtcatatgtgagctacacacacgtatacaccttttaaatgaaaaatgctgtgatagcaggagggctctgcttggctaactggttgtgtagcaagtcgggccccctcccctccacttagctattttgttacttgtagatcctgctctaattatttagcattaaacggacactaactctgtagggtgtgtaatcgtatttatagtactgttttattagtttgcattccatcctggtagtgtagtgatgtcataaataacagaaacatggtatccgatgcttgggaaggggtttacccggtggccaagccatattttacttgtcattattccgtgtggcggaaggtgggaaaataccgtgtgtgctgttaaacatgccaggtccctgcactggttagacagagtctcagtgctgtgctccgttgggaaagaagtgccctgcgaatgtgatgtggtttagatttatagcagcgtggcttgcagtgtgtttgctgccttagtcagctgtgagagcgccctgctggggccactcctttctgatggaaaagcagcagctgggaaggtgctgtttcaggctcttgctgtttaaaaaaaaaaaaaaagagcgagtaggggaaaactcctctaagtccagaagctggcattggagggggagagcgcggtcatgtggttctggccaccctaccctctgtcacagtgtggatgagagctttttgctcttatccaatcatgcctggaatgccgcttgccacttgggttatttctgctatctgtcgctcccggtgccgcagtgctaacagtttggcagatgggacactttttcttggaatttgtgtctttggtttgtgacttctggcagtgtcgggcctgttgttgccgcttgccctagccctcctggcccccctggtcaccatggcccatcggcttcggtttcattttggctctggtcgcagcaacacagcccccgaatcagacatcctagaccaggagagagaagacgacttcttcatggcattccacaccctaccgcggagaagcagcccgcaccccttcgcccagaacggaggggaggacggcggcggaggcctgcagggaggcgtgggtgcgcttaagcggagctcgtccatgttcatcccgcagctcttgaccagcatcgacgcccgccccacgtgcagctcctccgtgcagatctccctgcagcgcaaggccacggacggggccacggacgggtgcgggccgcccgagggcgccgacgatgggcctccatgcgcaacgcccgaccccagggaccaggcctccgccactgccaccacgagggcctcgccccagagtggctcccgggagccctcgccgagggacacccccgggagctcccctccgagggcagcccgggacccagggctccaggtcaacggcacgtgcggccgccgcgtgcggtgctccggccccgtggactgcgcggaggaggctgccccgggcctgcgcatccagcaccgcgcctccagcgccgacgtgcgccaggtgaggctgctgcccctgggccccgatggccagggcggcccggccgcggcagagcccaggcgctggtccctgcagcacgttccagatgcttctggaagctctgggaagcggtgttttgtcttccagttgcagcagccccaacaaggcgcttcggggccaggcagcgacctcaactttggcttcacgggcacaaagggggacaggttggtgaggtatcctcgcattcggctggagaggagcacctcgtaccccacgcagccccgaagcgagcgagggagccccacggaagatcggggagccctggaggcatcgcctcgagctggcaggatggctcctgaaatccgcaggacgaactccgcggagaggactccgcagggccaggggtgcacatttaagatcaggcaggatcagaacgcggggcagcagcattttagaattcttgtaacccgggggccggaagaagctccccagaatcccgaggagaaaagcgccaaaagccctgtttccacgggagctgacaccacggtaagttcacagcgtgtttacatgtgtttactgatttcaacttcgatgcttactctgcggcgtaaccaaaataaaacctcaccctctgttccgggagtttccctgcttcaggccagtggatctgaatgtttggccgagttctggcacgatgatttgtggtccagtgtttggtgcgcaaaacaccatttctgcaaatgtcttctgtaggtcctcaaagtcaaagaactttgtctgtttgggaaatccaagcagaataccttccccctgcttttatttttctgaatagaagaatttcgaataaaatttgttactttaatctgccaaaaaacaagtcagtgccccaacgtgctgatgttggaattgcatttaaaaagctgcttgcaagtatagcctgtgacaatactttaaaaataatcagttctcggaaaggggaggatattgcaaaggacctcagtttcgtctcttaatagttaaaataggtgaacgtaaagtttagtggaatttgattatctgtcatggcctgtttgctgcaggaggtcaggtcagtcgttgttatataatttgctttgttttttgtcccattaagtaatactgaacgagagtagtgtcgcttgtgggatagtgacattactatcccacaagtgacactgctaagatactaacagatgcgtttttaaagcacattgggttatggcccaaggctaggggaaactgatggggactcgttaatggtcagatggcgtggcgtgcaatttaacactgcacacttgagtgtccaagccgaggatgctgtatatagaatagtaagtaccctgtctccagctgtggagaaatagacgccttagaacagattctggccttcctgtttctctgttcctgatcgctccctttcagtgaaatggagtacagagagacagctgcacgctccatcgaccaggcatatgatgactctgcagctttcgtggtttagagtggaatgaaaagtttaatcagtttggtttcttttactagtaatcactagccagtgagtgctttctcctaaagaacaagctccttatattttgaattggatattttttctcctgaatttcatgtgactgccagtttgaggatatgattagtaaatgtctaggggacttttctttggatttcacttatgaattgtgattttgaaaagtgagcgtctgagtattactctagaattgtattgtcttttattgctttgtgttcagaaataagtttcgtctttcaagtaaactttatcactcctccatcattggttttcatcattttgaagatacaatcagatgcttaatgaaaatttatttttcttcttctctttccttccatgtatctcctttctttcattatctcaaactcttctattgggaaatggctaagtgctttgtcttggtctgaacctataccatgtattacacaatggtacaaattttgacagtgttttgatattatagtagcctttaacgcccacccccaacaaattaccatcatgacagttgtaggctttgttcggcaacacaattccatgctgaacttggaccacttaccgcatgaagattgacaaaaatatatttcctaaagtttgataactattcaattatattaccaaaaactgaaatcactttgcagttctgatgtggaagacaaagggattcatacaattaaactcaaaaaagttcaaactcatttggtttgaactttcaaatgtaattagaaaacaaatcgaataaactaaaacttatgtgtaccttgcttaaaagggctattctaacttgcaaggcctatgtagtgaaaaacaagtttctacacatttggagaatataaattctggaataaagagcttttcttggagagtaagttccaactagtgaacagtagtttgcattttcatatgtatgtatttttgtacacatacataaattagtacgtggttagtaagctggttttcttttaagcaaaacgatttttctttaaaaaacaaaaccaaaagtggtcacataacaaaaccgcctgctccattcagcaactttgtatgcatttcatatggacaggggtgttaagtttaggcagcagctgccaccgccttacttatcttgaaggaaaacattcacttgggcgtctacagtctggctgctaccaagcttttttggcgtttcaaatatccactgctttggtctaaaggacattacattattaagtttacatgaaaaattagctagaatctgttgcagtttggtggtggaatgatacggaaagtcttcctagatttgggaataccgctcgggattcatttgacaacgtgctcatatttcataagctatactttagaccttattacaagattaagttgttgagtacttttatctgtgcctcccaaacatcctgccatgactaaatctaaaatgtaacatgactccaaaaaatgttaaccaactaaattattagaaaaaatacaggggaaacccttgtgatgataagttttccacctggtttatcactgtcagtagacaagaattcattcgtatagtcatcaattataatcagttaaaaattttcagaattgttagaatttaccaattcagtctgtggcagtcattagtagtcatttagtgagtaatttagttattttcttataaattagcttttgggttattgggttctgagcctcttaactgcattagagttattctgaggaagttggaccaccatttaccagcatttgtgccccctttgtatgccattttgtgcataataactgtgaaactctgcattttacaagcttgaggagccagttttctaatctcattggtgttatgaagtactcaaggtctactgtgtatataacattacacccgttacttggaaagtttcagggactatctcagtgtcttgctgacacagtttgtaatgtaaacggagggaggagggcccacccggacaaaagcagtaattctaacacctactgcatatgctattggagaagagagcgttctttcagctcaagctctctggactttcctctgtgtcctctcagtggacatgtacttcacaggagtagtgtagtaatctcttgtgattaaaaattacttttattgaacaacaaaggaatatccaaattcttttcatttggggaaactttgagtctcttttacagaagatgtttttaatatacggccattttttgacattaatattagtcgatgtctgttttttaccctaaaaataactcgagtatccaatgtattaaccacccctttattttaaaacataacaacacaggaggcgaaggtgggaggattgcttgagcccagtagtttgagattactgtttctaccactgctctacagcctgggcagcagaacgagactttgtctcaaaaaaataaaaataaaacttaatattgtaatggagaagaaaaacaagtagcattcttttcattgacctggtttctgactggattcaatcaactttctttcttctctcatgtatagtaatgctctctcttaatgtggtcttagaataaaccaatatatatcttcaaatgtcacctgttttcagggatgttttgaaaagttggataggcagtgcacaaggttgacaccgatatgtttgtaaacagaaactgtacatggcttgcagcatagctcatgtttctgtagcacttcacaatttgaagaatgctttgtttatttcacttaatatgtatggctgtcccattgtggaggcattatctcacttgaccctcccatgtgaaatggtgttatttcactgtttcagatgaaaggatgtgataccgttgttaggtgtaataacattatgtgtatatcatagtgtatactatgataccactttgtgcacctataatgggaatgtgtatttatgtgtgtgtgtatatttgcacaattaaaaagtatatgttaagccaaaaagcagtttaatgcttcctgtgatgtgacagtttttttgaaaagtttagaggtggtaacttcatttggtgtcttgcagcactggcctgaaggtgagagaaggcttctttggggatccaaagagccgtcctctgcagttcactagcttttggtcctggagtacttagactccctctctaagcctattcctcatcagtaaatttgaggataaaaatgtccagctcgtaggttcatagttaggtttaaatgaaagtgtccatggaagtacctgattcgtgaaccaggtatctgtaatatacaagtctttcccctagcaggttaattaggttaattgtgaacaaccattttttgatcagtatggcatttaacacaaggacaacatgcatttatggcatacctggaaatgtttaataaatagctttgatgctctttctgttgtcatctcatctttcctaagtatttgtccctaacaccaaatacagtcttggaaaagaattgcttcctgaactatgcattatagaaaaggactcgtaagtatatttactgtgttgattttgaagccttataacattttggcttgcatttctagcatattttttaccatgtcattttgctgtaatatttccagtggttgagtctactgttactttggtatagactgaggcttttgagaaacaatatagtgttatatctacaaaatttccacattgtatgactttaaaatgagggagatatttgggaatatgtcttattttaagatactgtcttttagagagttttcataaatggtgcagctgcttctcttggctaagcctggtggcagaattcctagtcattgaaataaatctctaattttataatacatactgataagaaacttgctatcttttcataaaagttcacagtaccagaataaatttactttatgtaaaaactaccttaaaatgtaataaatgttggatagttgaatggtttctggatagttgatgaatatttctgtatagttgaggcgaatctaaatggtaatgctacttgtgcaactgtcaatgatctagcacattttttaataaaaataattacctgcatattactgtgggcgatacaggttagctatcctaaatacgtttttacctttttaactcttaattatattaagccatttgcaagaatgggaaaaagcaggaaattcataggtggtgttgaaattgctgattctacacaaaggtaccagaatgtctacatttcctctgtaaatgtcaaaggaaactttggaaacccacctcagagttggctggtgattattcggacaggttatcatcctgtctgcaaccttctagttctcttagttcataccaagcagcatgatattccatgtcctgcacaaaggagagcaccaaaacagccttcacctgctgcgtatgccccactctgaataaaaaattaagaaggccaaaggacggaatgtgttaaatattagcaaaagcaggtattgcagaatgtctatacatttctgggcaggtggagattattgaaagatttttagaaataatcttcgttcaccacattccagtgccaggccctggacttctgtctctatttgtgataaaatgtttttaagaaatgctggctgggcacggaggctcatgtctgtaatcccagcacttccagaggctgaggcaggtagatcccttgagcccaggacttcgagaccagcctgagcaacatggcgaagcctcatctctacaaaaaatacaaaagctagccaggcgtggtggcctctgtctgtagtcccagcttcttgagaggctgaggtgggaggatctcttgaacccgggaggcggaggttgcagtgagctgagatcgtgccactgcactccagcctgggcgacagagtgaaactctgtctcaggaaaaaaaaaaaaaaaggaaaagaaataatcttctctcagtgagcatgttgaatgcataatgttctcactggagttctcctttggaatctcttgattattctgctgtggcttccttgggccaactaggatacagaggagaataaatgagtaactcagtgagacaggtggcctgatgtgagtgggcctgaaagttagcccctgatgtcctggctggtttcatgccatgtcctaaacgggcactttcctggtctctaggcatcaccatgttttgacaggaagcttagtttctttcaggatggaggatggaatcaattgtatttcaagaagcctgttttttatgccctgacaattttagaactgtggactgttctgacacttttgagtacagtgattaaatctctgtgaagggacaggtcatgaaatcaaataaaaggacggatcataattgagctggaagggggccctcctatctctgatttgactcgttgctacactttagtattcggaaactttgtattggttcccttaagtgcctgcacaacctccctatttctggaaaccattcagtgtttgttttaatgttaagcattatgccacgtatccagtaagcagagcagagtaaattcctccaggtagcaagagactggaatttcccccaggcagatcagcttttcacaggttcctagagtttacacagccttcttttgtgacttaatttttgtagatcacagtgagtcaagtgacttttacttccctgtataataactttgaggagcctacttgcaacccacatcatcactcattatcttgcttacttctttcttgggggttagatgggctggggttgttattaagcatgttaaatactttgaaattcaaatcgtttctgatagatttagtttctctttcttctattggtcattcgagagctggtagacttttaaaatacatttaatgactcacacatgtcataactcatccatttccttgacattttcaagcgtgataataaatcctacttcttaggcttttttttttttttttttctctctctcatgttcttttcaaatgcatggctaggtagttacctcatgaaggaaaacaactgttttggtccagattttaaaaattgagttgaatagaaaaggtggggtggaaccagcaatactgaaatgtaataatgtatattaagctccaaccaaacaatccagcacttcttcaaatccaggaggtcttctggctaggagttacattgcagaactaacatggactcttaaactttgtaaggaattagtcacagttgaacactggaaactatcagcatacctctgggcttcttttatatggtcttcctcatgagttaaaatgccttaagcatagtatctgttccataggaccttactgattatgcttttccacttgaataaaagagatattaagttgtaataaaactttaaatattttaatttagtttgaatatttaagttgaattaacctcttactacagtaattatcttttttgctaacttcttactacggtaattatctgcttttataaaatccagaaacgatgttatacacattagcacgcattattaggtgcccaaatgccaaggctaaggacacagcaatgctaaggacacagtgtgcctccggcctgcttgcaccctcggttgaaattatattagcaagagaagctcctgcattctgcagtatggcatttttctccagctaatgtatgcaggggtcatttttaaatgttagattcacagatttgcagagctgtgagttgccttggaaattatgctggccagttcctttaattttaaagatgaggaaagtgagaactttcctttttaaaaattgatacataatagttgtacctgtttatgggggtacatgtgatatcttgtacctgtttatgggggtacatgtgatatcttgttaacatgcatacagtgtgtaatgatcaaatcattacatactgaaatatttgaaatatctgtcactgcagacatttgtggcatctgtgtgttaagaacatcccaaatcttgtcttctggctgttttgaaatgtatagtaacttcttattaactgtcgtgctgaggacatggactactgtgctgttgaacactagaacttactccttcatctgaccgtattttcgtacccatttaccaaccctgagagctttacttttgcagtaatagagaatattctttttctctcttgagtatgaaataattatttttgaataatcactgcacgtgaagccctatccttcttgacgttggacatataaatacttagggagcttggtttatagagctttcagtttcacaaacagatgggacagctgaggtgaggcctgcctagcagaagaagccttactcctgatagcaggcactaagcaaggcattgggtgacagattgcttatgcacaggctgggagggacaggaactgtgtcatggaggggcaagactggaactagatgctgaaaagtgaccagatttgtctcagtgggccagtgggaggggcctcattgaaagactgaaggtagatgtgcctcccagggatgtggtggtcatattggctccaaattgccttgttcattattagcaggtttcagcaaattatttttcatgtgaaacgttgctgaagatttcttgggtgtggctgtcatcacaaacaattcctctcttttccatcaaatgtggagttggatgaattccttccttgctggcctgccttccacaaagctgctctctgaacacctgccaggccatgctgaggacaaggaaataccaaggcacagtttctgccatttaatggtggtagcagagacccaggaatgcaatggattattgtcactttcattataacatcatagtgtaggatcataactggaacagagaggatgaagctttcttttggggaattgagggagggagacagggtcttgctctgttgcccaggctggagtacggtggcgttaagatggctcactgccacctccacctcccaggctcaagtgatcctcccacctcagactcccaagtagctggaccacaggtacatgtcaacacacgcagctaattttttagtttttgtagagatgggggtcttactatgttgcccaggctggtctcaaacccctggcctcaagcagtcctcctgccttggcctcccaaagtgctgggtttacaggcatgagacactgtatccaactaagtaggctttatttatggagtttataaagaaactgtttatatatacaggggagaatttatcctgaagaaaaactaaagaaatgaatattttaaatacgtctctgcatttctttttgttggatatgacatttatgtaagaaaaatgctaatctgtatgatatgagacatgttaactacatatggtacatgtatttaaatatcatatgtatttagatttagcaacaaaaagggaaatataaaccatatttccaccatttgaacaaatcgtattcaattatatgtgcatataaccatttgaaaaaattataatgttgatcggatctgcaacctaaaccaagtgccaaattaaattcaggatagataatttcatataaaatgtttcacatcatagaaaaagcagtgaaaattgagtatcagatctgtgaaggatgatacatttctaaccttagaagcagaaaaggaaatcacagaagttggatagattcagccatataaaagtattaaatttctgaaccatgaaaaaaataactaaaatgagggaaacaccagatgtttttcttagtgattcatgtaagttctcatatgtatatcttttcagtgtctaattatgtgcatattttggccagtgggtttgtatctctgtagaaagttctagtaaatactggagaaatactgaggttcccccactccagctctttcactccattgcaaagtaggtcttgtaggtgaatcacacaaacggattaacaagaaagacagaaatgtccagctcccaggttcttcattatgctgttgtgttgtgccaatagaaaatacaatatatcaaattggagaacttgtggttgaaaataatatacgcagattgctggtggcagtattcatggatgtgactttggagtgatttttaaacacttaagtatttttaaatgataagaccaattataggtactaagagtcttgtgttttgaagtgttggagttaatccagataaagttacaaatctaagcagacaccttattaagagatcattattctctgcttttaaagtggacttgctttctatatagttatgaagaacagatagaaatgttttaagattactggctactattaaaataatctggtgactgcagttatatctgggtctaaggcattagactttttggaaaatggatgcttttaatctttccttccgtatatttgtcacccagaattttaaaatttggaaatttcattcattcagtccagatagagaattgatcaattggcaattttattatttttcgctcatgaaaaactctagggttacaagaatatgctcctgaagttaacatagttacttttaaaatgtctcaattctaatggttaggtattagtcctctgagttccggttgccccttaacttggatcttaatttacagtttacagaaaattgttcatatttcatattttaagatcatgtactctaaaaccctattatacttgaaatgaagacctgttatgttatactagaatctctcatgaaaatgtaacagttcccaaggaactttgtttctgtctccatggaccacactggctactgtactggatggagggcaaggcgggagctgagaggcctttgcagaagtgcatgtcgccttagtatgtggcagatcctggtccctggcctgtgctgtttccctccacaccctttgatttctccgaataccaggaaagatcatggattgtctcgggagttagtctcccccttagtacttagcctgtcattttcatgttgcaatgcctagaaaatgggaggtttttcttctccttaaggaagtgttatttcaagatgctttctgctgcctgtgtcatgccagggcgtgggtggatatatttttgcacttttgcaccagcgagtctgcttctgatttgcagattgcatttattataaggcgtattgtccattgatgaataatgtgtgggcattaaagcaaagctgatacatagcttttaaaatagctcatttatcctgcaagcttcacccccatagagaggcaggcccttcagaagcgttttccaggagcaaggtttctgcatgtttccctcagttttggaggtcgtcgttttttgcccctactgtgggggccaagggaaaattgctctgcgccttctgatggtcccctgaaaaatcaactgtcaaaagcccaattaataggagaaatgccatacaactttattaacgtgcatgcagattgattaccccaaccccccaatggggttcagaagcttctataccatcctgaggttataggaagaatggggctcagagcccgaccaaaaacagggtatggtggtcaatcaggttatggtggcaagaaagattcttggagggagagaagaggaggcctggctagcagaggtggccctgtcgtgtagatgaaacctcctaggtagcagccctcacagagaaggcagatgtttctttcagacctttaaagatgtcagactctcagtcaatcttccctagatctggacaagggagggccttagagaaagatggcctcccatcagtgcagtttcctccccaggtgcaaatctccccccacagacctgccctctgaacagccattcacagtgtatcaaagaggtatattttggggtgaaatatttttattcccttcacccctagtttatcatgtgtttccttgatgggctgagggcttgacagatgagcagatagacacaatcttagttcatggaaaaggcaagaatagagatgggtagcggagagtttttaagttgctgctgatgaaatagacactcctttgtctcagctactgaaaattttctttagaacgtggatttaaataaagaaagaaatagacatcatgctttgtaatgaagtcctttggtcatcgtaagtggtcacagccagtttatcctcaggcttctttaagctgaccagttaaggtttctgcagaggttctgtgtttgagggaggagaggaagtccttggggaggaggggagcgttctatgggagacagtgctcttgggagcattctttcaatctgatacccatgcaagggtgatgacaaggtatggccttcagtgactcagagcctcctcccttcccaagcctcaggcctgaaagtctggtgatcctccctggcagaaacctcactggggatcattttttccttttgaacaagtttcttactttgcctcatatgttccaatcttctgtcagtggccaggtgacatctgttggaatgctgatgtgtgttgccaagcaaaacagatgcaggaagacttgcccaaagtgggggaagagagggaggaaagggaggaaaagtgggaggtagagtgtgttagctggggagatgggatcgagcagtatttatctatagaacagatatcaaagattgggtaaatcatggcttaaaactctcagaaaagcattctaggttcttgcacatctttgcaaggctactgaatggctcatttttatttcccaccctgcattcagagtggtgtttaaatggctcaccgcagcaaaaaggattaggtattacccttgtgctcaacacaagtctgtggtcagcagatttttaactttatcctagtttattgatatttctgtcagtgaacaggtttaactcttaatggaatagaatctaccaagaataatgcagactggataaaaagaatttcactgattttgattatttagcacattaaaggggacccctggccagaagtagatgtattgcttgggagaggagggcatagtacccaggtggtacttcagggattctgattttcagtcagggttgagaaaaactgatttaagaagttaatgctactgacagcctaaatctgggtttccttgataacctttggtgtaaatactgatttaatgcatttttttttctcacccacttttccttcatcaccccaaatctatattgtgttcacatggttcctctttctagaggtgggagatgtccttttatggctcagaggtccacaaaataaacttgcattcaagcaaggttgtaaaatacctatgcattaagagcagtccagttgaatatttgcaaagcatatataaaagagcttctctcctaaaataactgaaatgaaaggattaattttctctcagtttcctactgcaagaagtaagtaaaagtggaattccaattctagccatggcaagaccggtctatcctgttatgtcttgtgtgccaataccacttttctccaggtaactaaagtatctccctgctgtaaatattaactgagtgcatttttgtggcttttgataactccacgtcttgaaagtgttggccagttgtcaaattttcatgaatttcagagaagtgggtaataggtggtttctctcacggtatttaaagcgaagtagtaaagaggaaaaagactgaaaaggtaacctgggtcaactcattttttagggcgcacagaagtgtggtagcggagcctggacatcaggtggcctgaagcccaaaccaccagctcccccagcacaggagagtgcaaactgtagctcagtcttggccatctggggtcttctgcaaatgaactgcccatagtctggccaataattcacactgttgtattgctgtctttcattctctcttaagtagagcgttctgaacatatctgaacaattttttgacacgctgttactctcctagccacaggttattttatgacctagtcattctttacataaataaacatttatcaacagtgctgtctgggcctagtaaggtatatagcctgctttgtttctgcattaaagttcttagaccgccatgatcttgagatgtttgctgcttattgtttctttctgatttctattgcttatcagttactactacttgtggctccaaggatagaggccgattccctcttctaatttgctgcctctcatctgcttgaagtttaggtgtttagtcaagctcactagcattgtttataaaggaagaataaataggttgagagtgaggacttagggtagttacctttttaataatgtatatgatctgtctttggtctttctccctcatatctctgctgattttactctcgtcctcctggaacgtctctggaatcagatagatttttgtaagatttggatgtaagaattcagtggaataatatatactagctgtttagcctagtgctcggcacatattaatgcttaataaatattagctcttattattattgtttttttccctgaaagagaaaatcttaattcctcacagatgtttaggaattggatatgtagcaaccctatccactgaattagtatcagcaaacacatttttagttcatcttgatttttatcttcattgggattatgcctttatccctttagggttaatgaatttcctactgtgctgttatggaagaaccctgaaaaaaaaatcaataaaatgtatccttaaaaaagattttatgattcacttgactaccaggtgtcagcaacttttatttttattactttaagttagaaggactttgaaggttttcgtggtttattctcttcttttttaaaggccaaaccaagatcactttttggtaatggctacctttcctctgaatgtatttctcaaaaagttctttctggtttttattaaacccaaacagttgttataatttaaaagttacccttttagagtgagattagctagaaaagaaattaaggattattttaagtaactcagcaagtaaccttttccaagaagcttagattataaattaacgaaaaccaaattataaaccaaggtgtatggttgattgtgggttaagaattttatcagcagttttgctgttgtatgtaccagtcgtatattttactactgagtagaagaaaagtctaaaaatcaagtgagtagtttttccttagctggttatcatgtttgtttgatcattatattaaagtgctccttttatttttcgttttgtatgttttcccaacttaataatgaatgtgcttctctctaatctaatctctgaatttcaggagtctattaataaagtatgtgtaaagaattagttgctaattttggatgtggctgaaatgagattgtcagcaaattacaacttcaagcctaggactgcagtgttatggattgcacctcatccttggttattgaagatatattcaaaatttatgaaaaatagaaaaaccttattacttctgaatttttccacgttagactttccttatacttttaagatagtgaaagtgttattatataagatcatggaaagtttgtctttccagacctattttatgttaggattttacaatattaaattcataagataatagtagagactagaaaacaaatccttactgataatgaatttcctaagtagtaaatacaaatgaatatttatttgtaaacctgggtgattaagtaatagctgttcagtgatattgatggaaggaaattaatattatttaatccaaaggccaggcgtagtgactcacacctgtaatcccagcgctttgagaggccgaggcagatagatcgtttaagctcaggaattcaagaccagtctgggcaacatggcaaaaccttgtctctccaaaaaaatgcacaaattggccggtatgtgcctgtagtcccagctattcgggaggtaggaggtaggaggatcacctgagcttggggaaactgaggctgctgtgagctgtgattacaccactatactccagcctgggtgacagagcgagaccctgtctcaaagaaaaaaaaaaaaaattaatcccgaccttcctccaaaaaagaataaattaagtccagaaagtttggtgattcacttgctgttgccgcctttataaacataaaagtcagtaaggctaagggacacttctgaattccttctgctgtccaggtactgtgccgagttctagagatgcaagtagtacataagacagatgtggcccctgcccttgtggagactgcagaccatggctctttttcatgaatggtagagacactcataagtcaaatacctacatattttcatgaatgtgccaaaggaggcaaacaggaagctgagacaggaaatcatggggaggcctacttgaagagaggtaaggaaacccccaactcaggagtggcctgtaagctgaggcctgggaaggacccctgtgggcatggccagtggaactgcagcggaagcagccgttcgcccaaaggtcctgcgctgggaagagagtcagagatgctggaggatcagaaagggatcatccaagtgagtggaggagacagtggtccaggatgagcttaggggaaaacaggggcccctggattgttcacgctgtagaacacagtcatgcatctgatatataaatagcatggagataccctcagtagatgcaaaactcaaatgagctcagctgctctgaagcctgggaaaagtcagcaatttgtaaaattatgacacatccacattttcacaggaaaaacaaagactagtatgtaacatctcctttggtatttacagaggatctctctctctctcgttgttactcttacaaatgataggaggccacttttgttttccaaattctgtgccagatatcttgcctttcctgagatatagacacggtagagtcaggagtgtgtgtgagggcttgcagacttctttttatgtctttagaatccttcttcacttttgaatcatttggtccaggagtttaaggccttttcatttggcttttgttgttcatttgttgaacataaataactgtgttcattatgcagacaccgtgtcattgttgacaatttggtgttgtagattaaggcaacgtgaccatgtaacaagttgggcaaatgcacttatccattcagtgagctctaacctacaaggtgttttgcttcagaccaaaatggtagactgcagaaccttcggcgcggattttaagtccatctttaaaaccataggtagagattgtatctgtgtgttcttctttaattaaaaatgggaaaatgatgcgacagagcaaagacggccatggatcctttttatccctctcccatccacacagagagtttatttcccctcccctggagtccaggctggccttggggttgccctgaagtgatgccgggccctttctacacgtagcctttcaaaggaccggcagcttccacttcctgccttttggaaaagcttgctttagggatccagctgccacctaaaggccctgaagtgagccacgtagagagaagttccagctttctagcccatctccaagtgtcaggcaggtgagtgaagccatcttggatgctccagcccatcaccatccaactatagtcacataagaggccactgatgggcccagtccgtctccacactcctgagagttagtaagtggctgtcgtgttgggctctgaagttgtagactagtttgttagtgacgtataaccaaaagagagagtgtacttaacatttagtcctgggaggttcgaactttgcctccgcctgtacgtgagctccctggagtgtgggatgaaggagtgcttggcccagttgttttcccggaagctggaggagggcagccatgcacaggttgtgtagaccaaacagttcagggatgcacttggcttagacagctgataaacagctgcagtgcccccaagggagttgaaagagtgggtattttgttgtcaggagtagaattattcaccttgaagaacagaagatttgtagtttaaggaaattcaccatattcttaaaagttgcagaaagagaagagttcttagcctaggcctgcaccaagatccagttcttttgaatctgatttaataggcagatgatgaaggacttattcccaataataaagaatagttcaataggaggttggtagtcttaattgtcttccttgtcaaatcctagtgaatttcacatcagatactgtgccctgtgaggctctatcaccttagcacttggtaatacgttttttatgtagtaggtgctcaataaatgggttgagtttctataataatttgatttctgtagcatctgatttaactaagtttgctataaaacgaaatctgctattgtattcaacatcacaataagcagtatcagttgtaaatcatacctacatacagttaacccttgaacaaagtggaggttggggtgtcagcatcttaacacatagttgaaaatcttttgactcccccacaatttaactagtaatagcctactgttgacagaagccttactgataacttaaacagttgattagcatatatattttatgttataaaaattaaatactgtgttctcataattaaactagagaaaacgttaaaaatcataagagaaaatatatttgctatttattaagtggaaatggatcattgtaaagtctacatcctcactgtcctcacattgagtaagctgaggaggaagaggaggggttggtcttgctgtcacaggtgacagaggtagaaaatccttgtataataagtgagctcatgcagctcaaacccatcttgttcaagggtcaactgtacttgaatggatttttttccctgtcataattaaccacccacacacatcttactagaccaaaaaagaaaacttgtcaagcaaataatctcccatttcttgggtcatttggagagataacacaggccaggttatatgtcctgaaagatgagaatgtgtgaagtccccagagagtctgatacgaggccttcttccagggagtagtggtctggccgctgcaccagcctgccccctgccatgccctgactcacctgcacatcatgggtgctgctgatgcccaggcttcatggctgagcatggcacccttagcacccctcacctgttacccaacggagatttgtgggtcggaggcatttcaattggagaaggatggaatggctgagggcaggaaaacttaacaagcaggaagtctgcaccctggctgcacatgagaatcccctatgggcattgaaagtagggggagcattgaaggtagggggagcattgaaggtagggagcagtcaggtcccatttcctaagcggctctgcaggcctctaagcttgtcagtcatctttttggtgctgtgtggactagtgccagcaggaacaactggatagttttaagtctttggcctcttctgacactttttaaaccaaacattttattaaattctcattcaagttaatagcaaaaaaatattactactggtttcatgtttaggtctcatttgcagtttttaaaacaacctaacggagtatagtaaatacataaagtactcgatttaatgtgcattttctttttcgttttttttttttttttttgggtggggaggggggtggttttctgagacggagtctcactctgttgcccaggctggagctatctcagctcactgcaagctctgcctcccaggttcaagtgattctcctgcctcagcctcctgagtagctgggaatacaggcacatgccaccacacctagctaatttttgtatttttggtagagatgagttttcgccatgttggccaggctggtcttgaactcctgacctcgggtaatctgcccacctcggcctttcaaagtgctggaattacaggcgtgagccaccgtgcccagccctagtgttcattttctgacaagttctatgaaacctggtgacttaacttttctgaatctgtttccctatttgtaaaatgacaatacttgcagtagagtttatgtaaggaattaatgagggtaactttaagatctttgtaaatgctaatgtgttttacaattgtggtcagctataataataataataatattattattattattattaataaaatgcttactaggcgaagttaatagctcccacccattcccaaactacttaaggaggattttaagctggaaacagttaaggaaagccgcatgatgccatgagcaaagccttccatctgcacttggcatattgcagggtctgtagttgctggaatgcctatgtccctggttacgagccttgatataattgtgctaaggcattttggtggagtggaccgtgtcctgctgttgatcaaacatttctgtgtggagagactttgtttttcccttggggagtatttattttttagtgccaggctccgggttggctgtgctacgcttggcttttcagtgccaggcatacaaccatgtcagaagggggactgcatggtaggtctcaggaagaagggccgaggaagaggagaaaagggacttggctgtggacggggaatcctgtgtatcttggcttctctgagccagctgtgcctcagaactttgatttgatctttgtaccccatgggtcctgccaggtgaggggcacaatggagaagagaaaaaaaaaaatgctctgctgaaaacataagcaacaaataaaatagaggatagtaatcctaggataatccccgaggcagcagagaaaggcaggctctggcttgcatgtcaggagctctcttcctgggggcaggagggagggtggtatagtcccagatgagtgcttggcaggttgtttagagcctggtagcagtgaaaagaaatgtctaccaggcatcttgtgcatgtggtagatcttgacttgtaattgtggcagtctcccctaggctcctcggcagctaggtgacagttgcctgctagttcatgggtcaccttctcaccctctggcttgcttctcagtgggtgtaaatggggtaattaaaacctgtggttttagactttgctccaaagactgtttctggggttctgcagacattgacctgaaatttatttttattatttttaacgtttaccacctgtgaagatactgtacatttaaagatataaaatgtatcatattaaaataaaatagcctgtatgttttacattttgagattctgtttatgctgtttttttaaaaagttagaaatgtattggcatgttctgatagcttatttttaactacttctccattgttgtaatatcataacaggttggactggctaggctatggtcagaaattgcttatcagtgttttatacatacccaagggattccaacacagggtgtccatggtcctctttgagaaaactttgtctaaaagatattgaatgatgcctcattaaaaactcctcagaaatattttctcctggcttgttttcgccttccgtgtcattgtttgagaaatatccaagattccttcttttttacaattaaaaaaaaaaattgaagcaagtccataatcccatgtagttctttgatagaattaaacttcagataggcataagaaattcagataggctttctctccactggaaatgcatgcctttcgcaatcaacagtgtatgatgtggtctgttctggagttggggtctgacccttcagcatggccagcgctatctgaagatcagaaaccctggaagccccttgtctctttttcatcttccacatctgtctggcgtccaggccctgcccctcctgcctcttcactgccactgctgtggccagcctcttattcagaggagtttcctacctggttagacacttaaccacctccagacggaccccttctaatccacgtcccacattatagctcaaaagtatggattttacagatcttatcctctcctgttctgccaaaaccccatacggtcctccattaccaatcaggtgaatcgacttgcatttcccagcgtgtccccacacccacaaacactccatgacactgggcccgtccctgcctttattccctgtggcccctgtgtgcaggagccttccctcccctttctatcagtccctcatgtacaggccttcagccccctcactctgccctgttcctacctccatcattgtgccatttatgtttgcatgtctgtcttctctgtcatatctatctcaaactaggttgaaaattttttgaagatggagattttcagaataaaattgttcacacagttatatatttgactgattatacttttatttttatttatttattttttttgggatagagtctcactctgtcacccaggctggagtgcagtggtgcagtctcagctcactgccacctctgcctcccaggttcaagtgattctcctgcctcagcctcccaagtagccgggattataggcatgtgccaccacatccagctaatttttttttttttattatagtagagatggggttttgctgtgttggccaggctggtctcaaacgcctggcctcaagtgatccgcccaccttggcctcccaaagtgctgggattacaggcatgatccaccatgcctggccgattatacttttttaatgtgttagttaagatgagagagtccaaagtgatacagcccctgcccccacagagcttccagtctagtgagagaggcaggtaccaaaaagataatgcacatgacagaatggactgaactaagtagtagtagaagttcaaacgaagaagaagacacaaatggataaaagctatggattctcaggattgaggatgctgaaaggctgcacaggatgaaaggtgcgaccaagggtcctgaaaaaggcataggatttatacttgcaaaggagggcatttccagcaagaaggcttggaaatgagaaaatctcgggagaataggcccatgttagaaattcggtacacgattgagaggaaaagaagtgccactggggaagtgtgttgaagcaggtatgtggatgttcttccctatgcagtggtgtcagtaggattttttgttggtgtgagatctgggatctgtttgtaagccgtctgagagctgggactttgcattgatcaactttttgttgcacatgctctgtgatgtaattggcactgcatgatttgacaagaatgtgttttatgctctaaatcaggagtgagcaaactttctgtaaaaggccagatagtaaatattgtggcctctatttagtccattctgaatgtacattagacacaagtttctaaagtacattcacaaataagcattatacacttagttgtaacatacacggatgttgagcagagaaaaagctctctgatttttgtggttcctgctctaagccaggctaagtggtgttgtcagggttccaaccccttccatccctgaagcacactcagcaaaccatctagtttataagccacagtgtgctagtaggtgctgtgtgtatttttttgcggggggaggaggtatttattttgtttttgagatggggtctcactgtgtttcccgggctggtctcaaactcctgggctcaagtgatccttctgcctcggcctcctgagcagccactgcacgtggctgcatcgcttttaaaggtagatgatgcctctggcctttctcattgcctctgggtgtgtggcccatgtcactgtccagcgcattccactgtccagcccattccactgtctggccccatgccactgtccagcccatgccactatctgtgtgttccgtgccactgtccatctgtgtagggaagagagcaccaggggctggcctggtcaggagagctttctgggcaggggttgagggaggcacatgtgagctggactttgaataaaaagaaaggaaagccaaggagcagaccgggcgaggctgggtgcgaagaccagatgtggcagggatttaggaggcagagcgagcacaagtctgtgcatattggtaggttctgtagacttgtcggttgtgcagtggattcatggagcctgtcgaggaagctacctgtgtgcttccactaggaaagcacagccacagagagaagatgaggggcagggaagcagtattgtggggaattcggagtgagggctgaatctgagaaatattattttaaaattatgttaaatacattattttttgctgtctccaaccatcattactatgttcactgtagaaaaattaagaaagtcagtatggcatatagtcccataaccaagaaattcattcattgtgacctatttgagggtcatttaaaaatgactgatgtaatttggtaaaagattaatcaacaaaatgacttatttcataattaattactttccactaatgtgacatttctcaaactctgcagtatttccttttcttcttttcttttctttttttgtttcctgagacaaatctcactctgttgcccaggctggagtgcagtggcatgcaatcatggctcactgcagccttgaactcctgggctcaagcgatcctcccgcctcagcctcctgagtagcttggactacaggcatgcaccaccatacccagctaatcttttatttttttgtagagaaggtgtctcactatgttgcccaagcagatcttgaactcctgagctcaagcaatcatcctgccctggcctcccaaactgctgggattacaagtgtaagctgctgtaagctgctgtgcccagcctatattttcaagtctctctccttttttttttttttaaactggaaaggatagctgtgatggaaatggaagacttccaacagaataccttagttagcataactgtgtagtacaagatgtaaaaacctgttgaagtgggtggccttttgttatcattctgtctttctgcccaccctgtggcacagttctcaccatattttctgtcaactgctaccacatggtccccttctttatgttataaagtctcttaattattaggtaattattcattgtcctagctctccatgcttaccaaacaatattaacaagagcacggtattacaaatgagtcaataacaacttccctaaccttatggcagctgttttggaggaaaaagaaaaaagaaaaaaaaactgcctttttttttcttaatgcgttacaattggttgatcagaacagttttaaaactataaaatgttggctgggcgcggtggctcacacctgtgatcccagcactttgggaagccgagacgggcggatcacgaggtcaggagatcgagaccgtcctggctaacattgtggaagcccatctctactaaaaatacaaaaaattggccgggcgtggtggcagtcacctgtagtcccagctactcgggaggctgaggcaggagaatggcatgaacccgggaggcggagcttgcagtgagccgagatcgcgccactgcactccagcctgggcgacagagtgagactccgtctcacaaaaaaaaaaagcaaacaaaataactataaaatgtttaataaacatattttaaattaaaaggtaaggttgtatctagttatttatacagctatttttaaaagtcaggttggcaaaggtctctctgagtttcacaaaatatccgcgtgagtggtgcatagtttgtgctggcttatttccatttgttcgttgtgtttatggtaaccagtagcattttctaatttggttaaaatgctgtcattagctggtaaatgcagtcctgtcacctcagaggaggaccaagaaggagctctttctagaaagggagggatcgaattactcctcatcctcatatctacttatctatctgattttaagacaccactgaaatttatactgcgagcaatttaaatgaatgcagtaattgattgcaaaacatgtttgtaatatcagtgactgaaattaaataaaagataagtcagtactttttggatcaatccagttgatctaaaaataaaaagtagacatccactgaatggttgggtaaatgaacgaatgaattttggcttatgtcagtgaattggcctgactgggccttgatctacatagcttctcttgacattttgttgcccaaattgagtttgagtgtttttagtaggcagggtaaattagcggtatggatgggtataacattctacatttagttttgctactgtatatgagctcatgaaatggacttcccttccctaataatatagaaaaaagaaaaacctaaggaaatatagagaacacattcaatttgggaaattcccgtctgtatcagtcaaggataggctagatcatgttgatcatgctgcgtaacaaaccacatctcagtgaattaacccacaaagggggattttcttgctcacaatacacaatctgtgtcagcaggagagcagaattatctgtcgtcaccaagagtccccaggatgatgacggctaatcccattgtgccttcaccatcactgccataggtgaaaggaacgtgataaattgcacactgccttatttatttatttatttatttatttatttatttatttatttagagactgtgtctcgctctgtcgcccaggctggagcgcagtggtgcgatctcagctcactgcaacctccacttcccgggttcaagcgattctcctgccttagcctcctgagtagctgggattacaggtgcacgccaccacacctggctaatttctgtatttttagtagagacggggtttcaccatgttggtcaggctggtctcaaactcctgacctcaggtgatccacccgcctcggcctcccaaagtgctgggattacaggcgtgagccaccatgcccagcccatacactgcccttttaaagcctgtgttcgaaagtggcacacatcactgccgctcatattttactggccaaagcaagtcacgtggccatgccatttcagattgggaagtacatttttaccattgcccagaggaggagagagatatgcaatatttgagaatagccctaaagactacaatactatcccttagtccacctaaatgatcctgaggctttggggcaattaaaaaatccttactcttaaaaaatgtcaggcagtaagtcttgaagccagctgctggtgctacacaacatacccttgtcttgtgaggaatcccttttgaaaaggtaacttacctcgtcacttcattattgctcattgctacaggttgaattgtgtccccccaaaaagatatgaaatcctatcagtacctctttgaaaatagggtcttatttgaaaatagggtctttgcagaccctcttgcagatggagtcaagttaagatgaggccatgaatgtggaccctaatctgactggtagccttataaaaaagggaaaatttaggctcagaaacagacatgcacactgggagaatgccatggaaagatgaaggcagagatcaggtgatgcttctacaaggcagggaactccaaagattgctagcaagcctccagaaagcaggggagaccatggaatctccctcagccttcagaaggaaccaccctgcccatatcttgatcttggacttccagcctccagaacttttaaaccatcaatttccattgtttaagctactcaagtttgtggtactttgttacagcagttttagcaaactaatatgctaatcaatatatatttttatcatcttctttggacctagcaaggagaaccacttgggaaattgaaacaaggaccctctcgggaaagtttggtgaaatcctggccaacatgatgtctaatgctgattgcagtgaaattgagtactgttgttgatttttttttcctcaaagtagcttttggaagtgaagagtaaaatgtgttagtgggaactcagtattagcaagaagagaaataagggactatgctagcaaaatgaataatctgtctttattatactgtcacaggtggttatcaagatacagtttttgtgagacaaaaagctttgtggggctggagttgcttttgatggtggtggcagagggagagttatacgaatagaagtaacttctggtagtgtcttcgttgcatgtgggtacacccagtcttatgggcaagctgattttatataatcttgttcttttcagtaaattttgtatatcaaatatttaatcttacttctttgaaaaactttttagataagtgatgtttgcaaattgaagcatattgaaccatatatctggatattttgtttgattataaacccatttttacaccatggccatagagaatggtgccgtgggcactatcaggagtgatgtcattaaccccacagggctatgtggaaagcgtgtggctgggactgctgtgtggttgggacaaggcagtggtgcacatgggccagctcctgtaactttcctgtttgtggctctcatggggcactcctgctcctgctctccccgtcctcatccatgatacatactctctctcatctacgtgctcataaatttcagcagcaagaactgcatgatttttaaaattctgagtagatgcttccagcaaaggatttcctaactgatcactgccagagaagaagaggtgctaaatagttgccaagttacatgctttttttcccaaatgaagtacttcccctgctactgcttgtaaagccctgattgtgtgtgtgcgcagaacccacatctggtgctggaagcctaaggactagtgagtggtcatgtggtttatggcccctataaaaggacccattctaaaagtctccaagaagctaactccacaatgagatgatgtgtgtgtgggtgtgtgtgtgtgtgtgtttgagatagggtcttgctctgtcacccaggctggagtgcagtggtgtgatctcggctcactgcaacctccacctcccaggttcaagcaattttcctgccttagcctccccagtagcttggattacaggcatgtgctaccatacagaattcagattcctctcctacccctagcctgatgccctttcattagctatacaaaggtggttgagtttcaggttaggcttattatcgtttaaactataaactaaatattcaccaaagctagcccagcctaagcccaggaataatcaaggcagcttgaaacctaaaagcaagaggaggctgggttagatcagctcactgtataatttttgcaaaggcggttttattgaaacctgttcttttttgaaagctggctctttctaacattcaaatgcttttgatcaacctattttatggaagcagaatattgaaattaaagtaaatattagatgaactttatagccagttgttttcctcattcttcaactctttaccctacaaatcttatttaaacaacatgttcagcaagctgttatcttgcttacgcaatgaatagaacattatgttctaaggtacagtttgctcacctatgaaaagaatttaacctcttttctaagtagctatacacaattgtcataccttaagttcttatttagatgcatttcagaatattagagcattttgcaagtagatgcacgttcttacccagtgtcagtgtttatagacagacactcaccatgggtatatttaagtctagggtggtaaagaatataaatgtcatttattaaaacctgaacatagccaactatgaattatttgtgttaatgtaaacgtcgaatgagcactgcaaacatttgatgtttgaatatttgcctgtagaagtgcagtactatgttctatagaatataagtagatgccaccccagtcctcaaggtttcagtgaggtcatcattgtatcaataaaggtgccaatttaagatgctaactggacattggaaaaaatttgttgtcctattctgaaggatgagtcttatataaagtgtttttaaaatactttattgaaactgccatgttcttttcaattttggtagctcccctgcatttaatttagtcataagcgtctgtattaatgggtgtgttcaatatgaaggcatcctgtgaagacaataaattatattatacttatctagtctgcactctttatcatgttgataaaatggcccttaccagtaaaaaaactgtttcagaatgtgtaagagtaagtctgtctcagctgactgagggcttcatcatgttcatgataatcccagcagcttgaaatgtcaaactggtagctgatccatagcacacagtagtgctaattgagataggttggtgtggataattgaatttaattgaatattaaacaccagtaagtgctatgctagatgttgggaccacagtgatgaagatgacattatcctgacccgggaggcgctccttatgtgcataaactgcatttggaaattttcatgatttgagagtcatctatggttgccagtagagattttcccagaaggccaaggatatatggggacatttgactgttctttgaccataattatataactttttatttgcccagaatgaacaactgcagggtaacatttatacaaaaggaatttagtgtgcttagagtgctgataatacttgagaaactaggagagctgttttaaagcacttctttttcttttttttttttttgtttttttctgggctgttagaatttgacattgttcaactttaactttgtcctcattgaactttatcctgctaaggagctaaaaggtccatatgatcaaaaaggcagctctcaacccagcacgaaattccaggctcattcatttctgtttacctactgccaaataagtcagacaactgcatacttgctttacagacgaatagaggacagcatgttgttcaataattgtagtttaaaaagtatatgtaagatacatccacaagaagaaagatagagggagcataccgtttgtcttctagtataggctccctgcccatggagatcacagagtagaattatgatgggtgccttagagaccagcctccctcaggatcatgagttcacctcggcaccacagctctgggcaacgtggaattagacaaattaaagtagttaagttctgacttcatagagcagaatctaaacttttgttcatactgcttttgtgttcttgggccatctgaaaaccttttctgtgtaaatattcctgcaatatgcggtcttacagaggtcttatcacgcatatttccctttgcttccttatgtatcgtattttttcaagaagaagacattcaactttagagacaatggaatcattgtgttgtggctttaattcaggtcattgtccttttgtgagttgcacgtgtgcgcgagcctgtgtgttttgcttggaggaatagtgaataagcaaggagcagagtccatttgctttttctaacagagggtggggcagattctctcacaaccattaaagaaaaaaataagataccagcaataatgataatcagtcatgcatatgtaatcgtgtgtagttcatacttcagattcatatacagctgagcatgatcttgaatgttacaggaagcaagcttgaaagtcaagttacagtagaactttgctaattcatgcctgactaatttgcccacccagtagttcctactgaaatcttgccattcctctaccaactttcagaaaaatttgatagcaggctgtggagaaggctcatgttacttcttatgtcaaggtgtaaacaaaaaagagagcacaaaatacatccatcagaccacatgaagtgaagagagagaaaacatctgctgaaagccggattctctgtttttttcctgctttttaaatgtaatctgtctttgtttatgcatgccctagaaacatgcataagtaaccctgagtagtctcttagtttaagaaaacctactataaaatttcttgttgtaaaataaaattctaaaaggaataagttgtggacatataagtatcagacagtttatgtaagactttacataggatgcaaggtaggctgtaatatgatttggtaattgttttatgggggaattttgttttgtatagcgaaaaagaacagtgagtgatttaactgaattttatagtttaatattgttgttgttttaactaaaatctttggtttgctattgcaaaatgaaagagaaaggaaattttggttaatgttaactttatttccaaaaccatgtgatggatgctgaccaaatgtgtctcaatagtgccattgaggtctgttgcctttttttttctttgaggtgctaagtgaaatgtgttttgaaccttgaatgttcactatgcgacgttctttgcattacaggtagatactgcaaacttgcttcaaaaaaactaaaaagttcaaataactaatggttcatatttgttccagttagtaaatatcacgacaaggtatcatcgtcatcccatgttctcagtatagattcagcttcatttcttacaccacacacccagaggcataaatggaagtacacagacaaaaggaaaggcctgagtttaaatgtagttatcatgttcagtgttcgacattttattctgagaatttaagtgtttctactgcagtaccacaaagtcaatctgcatattactttaactagatcacttgtaaaaataaatgaataaatgaccagtgatggttcagtgacaagagtgccagatgagtcatgaatgttttcacaagtaaatttgatagtaaactgctaagtttactgtatacgctgtgtacaaattagctcagattcaagatttttgctctaacaactgaacgctcagttgcatctttaaactttttgttgcgtgagaggggctgaggggcaggtgggaggaagtcagcctgcaggtgggaggtttctgtctcaggattgctgatacccctgcatgctgctgggttgcagccttggagtatatggcctatgagacatggcatgtctgatttgatggaaaaagcagcggagaaccagtgaaccaagctattccgtgtattgactttttaatacgtttactacaagaatctgccttttaaagtacttttaaataaggttataaacataagtgtgttttggacacagcctgcagcaagcatgcctctcgaggtgtaagatgagtcagctacacatgctcaggggcccgttccaccagccacagtagctgcagaggttgagagcaactgaagcaagagaagctcttagtaattaggggaaggaagcctccacttgacaccgcatcaccaccaagtatttattgagtgtctttggtgtgcaaggcaggagaatatcttctatggattctacatatttcagggttaccagagttataaaatcccttgaaatctatatgcacaaattgtaaatacgtatgcagctttttataagtgttcaaattctgccttaattgtgctcaaggatcagggtctcaccccagcattgtataccattgatagtcatgatttccttagtgaaattaagtaaattgactttcagagactttatttcatattcatcatgtccccatgtagccatgaaaaaatgatatgtttaatattcatctatttgtatgattaaaacaaaatatccgcaactactgacgattcaatgatcagatattttactgtaaattaatatcatcataaactcctagacattagacttcagacattcagagcccactcgatgcttggcacaaagcaggcaccaaatacatatttatagaatgaatgaacaaatgaaggaagaaacaaagaaatgactaatgcaccaaccatttatcaggaagtttaacagggaaattcaacaaccagatttgttttgctaatcttattaaagtgcaacatgtttgttgtaaaaatagatccacattcgtcattgaactggacagtctaaaatagatccaaacccattgtttgattatacttcacaaatgtaaggtaaaatagatgatactatctgtcatttgcttgatgctattggcaaatgtgaagcagttaccagcataaaagcttggaggttactccgaatgtatataaacaacagtggctaggctcacaagtgggagagagtctaaaaataggtaggcgatcccttatctcgttgcattgaaaattgtgtttatatgaagtgatattattagaaatgatgtgtgagaaaagaatttctgcaatgtctcctacaaattagagtgagaaaatgtatctttatgcagctttgaacaaaggattattattgctggactgtggaccaaaattttagtcaagttttttttttttaatgaaaagaaactgttcatttatgcagacatacaactttgtgtcctatagagacttgtcatctgctcttaaagttagcaccctatttttcctctggatgtccactgagaaacccactggtgtgatggtcattgaaaaagagagttgtgtcagaatgccctaaaatcttagtggcttaacacattcccaagtttatttctcattcacactacccgtcaacataggttggcaggcattcggatccacagggtcacacagagaaccaggccgaccgacccacatggtcacacagagagagaaccaggccgaccgacccacatggtcacacagagaaccaggccgaccggcccacatggtcacacagagaaccaggccgaccgacccacgtggtcacacagagaaccaggccgaccagcccacatggtcacacagagaaccaggccgaccaacccacatggtcacacagagaaccaggccgaccgacccacatggtcacacagaaaaccgggctgactgaagtttgcactggagcttttcacagcccccactcagaggtgagataggtcaccttttctcattagccaaaactggtaagatggccttccctgaccacaaggatgctggaaagtgtagtcatcttttctctgtgcctggagaggagagagaagtgaaaattggtaagcaatatttctattttaaaagtggttagagtgtagtgcaatgaatctagcaccattggttcagttttaaatggactgattccatttgtctaattctgtgtcagttggctgttttctgacccctgagaataatttagtctggctgattcccccattgtaccaattgcctggcatatgacaaatgcatttttgcctgtaagacaatctttgcctaggaaagacagccctaatttttatgtcttgtattttccagtaagctaatctggagtatcagtttttaagactgatacacaattagatgaaactaattaaggacaaaacatttgccacttttaactgttgataagtgaaactgagatttccccccaccccatggatacagtgaacatttgtcagcagctggtaatggctagtataaagatgtattcagttttcccttcccttcctctccctccagccttccagccacccccttcccaaacatttatgctcatttagagaaaagcaaccccagttctcttacctgggatatcaccagtataaaaagcacattcgtataaattatctggcctttaattacctgtaaccctgtaggaaaccccctgggaaaagtaccacaaaagaacgcagctctgggggtctgtgagaggcacccagttcacacccctaaaggacagagcgagcactcaaacgcacagctttgggtgccctctgaggcgtgcactggctggtagcagtgggtatcaaccatggaagttcacggaagattaaaccgcaagttcccacgcaaggccaagtggctgccaggacttggaggcactgaccctgagtggtccttccacctcagcgtatactgtcactgctgcctctgtggcttcccctttccctccaagtagagatagatgtctcgaggtgctccccaccccagccaggttgtcctctcctgggtggcattttcctttctactctctggggctttcaccaccccactgggcataactctccacaggctcccctgggaggggtgcccccacctcacccgccacctcacttctcagcccctcttcccatccaagggctccctgggctgcccccaccctagtcatgatctcgctcctctactctctcgtagtactttatttttaccttgctcctggctcacattacatgcttatcttgtatttatagatggttctatatatgtctccttttgcatccttttctcaaagctcctgtgaggccagggatggttttatgccttttctcatccccttatgttctagtataatgctttacacatgattaaattctcatcagatgttgaatgaatgagcttattatgcattacttcttagtacaaagaaatatttggaacgtaagctctgaaatgttgatattctgtggatgcttggattacatacaatgtcctaaataaacacttgcctgttaagtagaagtcagtctggaaagtgatacctttagatccataaaatgtttataaggcacatgaatggacaaccacgttgttttttgctcttttatatgtttaggttactgacagcccaaaatacattagcttgtctttgggctaggaggtacctaaagttgtatttttctctcatgtcattttcctgggtttttatcatatccaacttcgtaatgtccaggaatttgagattaattcctcaaacttgtcgaataatacaagaggaaacttgtataatacagagcaaacttggttggtgagtagctgctagagcaaacttggttggtgagtagctgctacagcccatacatggatttgtttcttcaggtggggggataattgtatccatggactcttcttcattaactgacggatcaaattattttatgaagctatgatgagaaatggcttgtgctcttgggaaaatcaatgccaatgtaggtaatgcaccagtctagctggtttttaatttaaagaacaaattatcttctggaatagtaataaatccccctttggaacagcaagaagacatcagctgttggatatgggataattaccatatgtttcaatgtcgtaaaaaggcacagcaattttaataacccaggttgtgtacaagaaagctcttgcttctgaagaatccatcaaccatgcgctatgatcatgtaataataaactgctgtttacttaatgctgtttttatttaaagttttaattaacataacctagtctttgcaaaacatctgattacctttgactcatatgttttctggtatataataatgggttctcatgagttgtttattttataagatctcctgtttactcagagtaaggaaaattttttttgaggtaaggtcttgctcaggctggaatgagtggtgcagtctcaactcactgcagcctctacctcctgggctcaagcaatcctcccacctcagcttcccaagtagctgggaccacaggcacatgccaccatgcctgactaattattgtattttttgtagagatggattctcactctgttgcccaggctgatctcgaactcctgggctcaagtgatccttccaccttggcttcccaaagttctgggattacagtcatgaaccaccatgtccaaccaggaaattttggtattaggaagtttcccacataccatttgtctttggtgccatgaacacctattttgtctaatttttataccaacctttcactttggcacatgggaaatctgataaggaatcgatatcacggaaatacacatcacactttctgcttgccgctttcttccaaaataaacccaaggattccccttttccaccaccaccttaatttagataaccaagataaatgagaaggttttcgcacttgatggtgggatttcttatcaaggctattgaatttggtttggcactgactaattttggtatccatgtgtttttagagtaagttgtagctagggtggtggggtgatggggagactctcactgaatggctctaaattcagtattttattctttaaccaagcagctgttcacacacatttcttaggaagtggctaaataaaaatatggcagccctggaatgaacagaaactgttgctctttcaaaaaccagcagctacaaatagtgatttttcttccacaaatacttgtttttctgtgacattctcattggttttattcagttaaactcccagaccatgttgatttttttttgccttttattttttgagctcataggtaaaaggagttgaagtgattttattttctgtttttgtcttttttttttaagtttttgtagagacaggggtcttgctatgttgcccaggctggtcttgaactcccgggcctcaggcaatcctcctgcctcagcctcccaaagtgtacccagtctcaagtttttttcacattatatatttgtgttctttctgtttttaactaatggtctccattatttaggctatattaaaataacaataaaaacagagcagatacaacagaattcatttggttggccattggagctgtttttcctttttctttttaaactgactttatttttttggagcagttttaggttcagagcataattgagaggaaggcacagaaatttcccatgtatttcccccacacaggcacagcctccctcatcatcagcatcccccaccagagtggtatgtttgttacagttgatgagccgacattgacacatcatcacctaaagtccatagtttacactagggttctctcttggtgttgtacatgctgtgggtttggacaaatgtataatgacatgtattcactattatggtgtcatacagaataatttcactgccctaaaaatcctctgtgcttcatctgttcatccctaccatgcccctaaaccctggcaaccactcatccttttactgatttttacagttctgcctcttctgggatatcatgaagctggtggaataatgcagtgtgtagccttttcatagtggcttcttttacttagtaatatgcatttaaggttcctccgtgcctcttcatggcctgatagctcatttctttttagtgctgggataatattccactgtctggaaatgccaccgcttagttagtcattcatctactgaaggacagctgggttttggcaattatgaataaagctgctatgagctttttaaaaaatagtttaaatgacatatcaatactttaatatttaaaatatctcagtgatcatatagcctcagaaagcacagttttctgagctgggtgtcatgttgagtggtgttagagtgccgtgctgcgtgctcaggtgctatgctgtgaggaaggatgataggagcagattctgtataagcagatgcacaaccacccacagctgcactttggcacccagggcagacaaataaaaagggggcaagatttttttaggggagattcctggcagatagagattttcttcagaatgtacagatttatttttggggggtggttaggggcgacagttgttttaagcagagttttgaaggagtttggtttggtgagtgaaacagtatttcatttttgattgcctttgtttttccagcaagaaagctactcctggtctgtgggcacacaccaaaaggctttgggcaagacagagggagcttgtgtgtgcccccagaccggagtcataccacagttgtcagatcactttgcggcagaccttccgacagtctcctcatctctcttgtggaatttgagtttgacccacaggtagcattttttattttggtggtaccctgatgtttataaggaacctcaggacactattagttaggaaggagattgtcccatgcaattcagccttgcaagagcttcctggttgatctagggacaaggtgtctatcactcagccctccaggtcttttcttcctaaagcaggctttggagcaaagcctgaccggtctttgcctatgactgagtttcccagggctgctgtaccaaactactaccagttcaacttaaaacagcagacatttatcctctcacagttttggaggccgcttcaaagtaggtgtcactgaactgaagtcaggatgtccgcagggctgcgctccctccagagcctctaggaacacatctgccccttgcttcctccagcttctgggggctgccagcgggctccagcctctgccgctggggctgccttgcctcctctgctgtgtcagatctccttctgcatctctcttacaaggacacttgtgggccgggcgcggtggctcacgcctgtaatcccaacactttgggaggctgaggcaggtggatcacctgaggtcaggagtttgagaccagcctggccaacatggtgaaaccctgtctctactaaaaatacaaaaattagccgggcgtggtggtacgcacctataattccagctattcgggaggctgaggcaggagaactgcttgaacctgggaggtggaggttgcggtgagctgagatcgtgccactgcactccagcctgggcaatagggcaagactctgtctcaaaaaaagaaaaaaagttaaacgagtgtcttggcactcccctgtaatcccagctacttgggaggctgaggcacgagaattgcttgaacccaggaggtggaggttgcagtgagccgagatcacgccactgcactccaccctatgcaatagagtgagagtctgtctcaaaataaataaataaataaaaataaacaaggacacttgtgactgcatttagggcccagaacaatcccccatctgaggacctttcatttaatcacatctgcaaaggcattttcatgtaaggtaacattgaaaagtttcaggggtcaggacctaataaattttgtgggccagtattcagcctactgtcccctagttacaacaaggatggggcagcttatggacgagagtgtcaaaaaattcagattctgtcctacagggatcatcttaccctgcagctgagttgagtgattattgagaacatactacgtgttgatgctgttgcttagcactgtgggagatacagagatacataaaactctgcttgccctgaggttgcttgtggttttgttggaagagaagacgtgtgtgtaaaattagtcataagaaaaaggtcgtgtttgatcctgagagccagatagtggtacccagcagtgagcatccaagcccttatctcccaaataggagactttgtaggctgaaaactggcccacagatttattaggtcctgacccctggaacttgtcaatgttgccttacatgaaaatgcccctgcagatgtgattaaatgaagggtcccggtatggggggttgtcctggatgagctgagtgggccctaaacgcagtcacaagtgtccttttaagcccctgctgtgcctgttctcttggtaaatatctctgtgtgctggaacatttgaccagagagagatttcggtgatcatatccatatttgactgtttcctattccataatttgtcgctgtctccgagtcttttcccgggagccccctattacaagtgcacctttctgtgtttattcttccctgttgtgcttcgatgatcccttttttctattcttcagtggctttttctccagtaaaatagcagtttaaattcttgaagggaaacaattaaaaaataatgtctctgggttaacaagtatgattaccgtcatctaaatcagtgatactacatgagaataaaatcaaggagacttacatttacagtagatgaatctatgataatatgccctaccgttttgggtaatttaaatttatgctagttcactctgtctacatgcatgtcatatcttagtgtaaattatagaaatatccctataaaagaaaaaataatttttttctgtatatgttttaagggaacctgaatttctttgggttgtaatgcatgatacagatagtattctgggaatacctgatgttcagcttatccctggaaccctggttatcttagtaaaatatgcagcaacaatatagaagacaatcctgaattttccactgcacaattagggcttgattcaccgtatgacttgggcaaattacttaactttttgaaaccacacttttctgattttcaaagtatgactaataatggtttctgccttaggattattaagatgattaaatgaaataatgcatgtgcaacgtttagaacattgctttaaagtttgtcttttccttctctctccccttttttcctttaaaataaacaaacatgtttgagggctgggtgagttgatgggctccctttagtgcagcacttctaagtaatcactgttccctctggttcattccattgagcacatgatgacaaacatttctggggatatcatgtcaccttggatatagaacagtctcctaaattacattttatatgacaatgtctcactgtatttttgtcctcttgaattgcagcatagcatattatttcttccagcaaaaagcaaaattaaataaataagtgattaagttgctggctgtagctgatactgattcatgacatgactgaggattacttagccatcacattgaattgatgacagttgccttctaaatattatctttagtcacatccctcgaatgtttgcagtgactttcactcctcaactagaatatgcacgtttacatacacatgcgataaggctgaagaaggcttgtggctcagcacaatttggtcttgtatgcacagtaatcattctgaagtgtatgattctgttttattagaaattctcacttgaatttcaagagaataaaggaggattcctcctacacaaagctgctaattgtttgcacactgtgtgcatcccgcatgataagcgatttgagaaggtgccacatcagtgcctttatccaagtgtcacctcctgtctacagttcccttagcagggtgaagggagaaagatgcaaagactgagcttggctgaaacaaatgtatttttgtccccttgacttcttgaattgcagcagagcatatgaataacattgatatatttcttggctgctagacaacaacgtatttctttgacagattgacgcctgaaaagaaaaatacagtatgtactaatgaatcaaaacattttttagtacctttgtgtatactaaatgtattttagtttctatctggagctagttgccatttactgtgggtttgaaatgccctaagttatcttctatggatgggtagaatcaatttacccacacattgacagcttttacagataggtcctgtaacagatataattaagttaaatttcataaatagataggcagtctcctccccagtcctggtccctttgggagatgaattggggtgggggtaatggagagtttcaaaaaggctttccggtgtctttttttaaaaataaggttttaagagtttcatggtcagctgttctcagtttttctcaagatggtatccaaagtaaggctcaaatttatgatttatcttccaaatgcttaaatggtccatttatgatctgccagatgttacaatgactagctccccaaggaacgatcaagaatgtgccaatgtctgggcaagatttttatccagcaaaaagaaaaaaaccataagaattggaggttttactttgaaaagtaaaatcagccacatccatgacttaagagactgtacatattgtcatgggtaaggatttagatcttggctccactgcttactcacagtgtaccctggacgagttactaggcctttctgtgttttactatgctcttttgtaacacagggagagatagcatctatcttctaaggttgttgtgaggattaagtgaactaacttgtgcaaagctcttagaatagtgctgggcacagagtggtgagtgccttgtatatgctaatagttgttgatttatagcttaaaattaattgtgtgatgcaaataggagggttaccaccccaagcttaaatggaagttttgcagcactttgcactcttgaggatgtatctgggtttaatagtaccttccatctagtgcacaagtcttctcccaggctcatcctcccaaacacctctcagtgttatccccactttgcaaatgcagtagtagctgggctcacagaagttaaataactacaccaagtcaccatccaaaaaggttcagggccaggaatagagcgaaagacagaatacggagccatgctctttttgctgtctttctcagtgctcagttctcagaattactcaggaatgagagcagagaaactctgtataggccatgcctggagttttttgcacatggcagtcagagagtcccagctcagttcagtgcagtattaccgaattccagtatatgctgggctctgttaggtgcaaggggttccaggatgaatgagtctgtggcccagtggacaaggtttgcccctgtgtgcagctctgtctgctttactagatttgctcctcagattctaaattggaagtatgtgcatattgcttgatttacagattattagagaatttttttcagttaaactttgtccaaaatagacactaagggcaaaggaaactggtattattacagcagggtgtatctcataagctctgagaattgtacatgtataaagaatctttgaatcgccgagtcttagccccacgttttatacagcacagaaatacagcacagaaagtttaggtgatttcccttgggttccatagtgtgttagtcaccaggttcctttaactctctcagtactctttcctttaaactatggaagagctcaaatgattaaatcaataaaagaatgacaacttatagagctcatttacgtgtctgaatatatcagtttagcccagagtatctgaactcctgggccattgctattcactgaccccttctcctcctcgtgttctagtaaaattcagcccatgaatatagtcattagaagttgaattttaatgaaattgggcgctttgatcaatgggaaggttgaaagttatgtgggaatcatctatatagtttatagctgtgactatgtaggccagctcctaagtgccccctgcaatgtgtcactctctctggttttctttccagggaggtaccctgtagaataacagtctaatttacctctcagacatctgctgtctttcagaccttatgctagttttgtgcatatcttcatgattcctctaataatgcattggattataaactattatctccacttgagagacgctcagagaggctagggagcttactcagggtcagagggagtgcagctgaacagttctgccagggtccctgtgattgttggagcagcctgtgttttttcaagctgttgtctgtgaatcgtacggtagaaacatggtgcgtatttctgcagccttagttctagccattgaaatatcatggagttgaatgcagaatacccattaatgtttaggatgaccaagaaactgtgcccaggccccaagcccagctctgtcatcagaggtgagttaccactggtgccatgccctttgattccctacaggcgccctatggaggtgcccaccagtgtgcacttggaagtgtgatggaacgcatcacatccccttgttgcccctgccccggtgatagggggattcactaagaacttcagcatagtgagagaatgtaactgaagctcctgggttagtgctgcttggtatcccagttactttgtagatttcggaatcttttgtcgtctagcctgaggattactgttgatgacacaattttctttgggattataggcttcatgtttcatacaaccagcatatacgtaaatggcctcttcagtgtatcatgtatacacattggtgaatagcttcccactagataatgttttaaaggggaaaaaaagaagtcatttctaaaatcccaagagagtgtccccgttttgaggttagagcacgttttttagccttatttagtcttgcatcttgctccttatgctacctttcattgctttatgaaattattttttaagggatactttctaacattccatcccactttttttaaagctcgttcatatactttgtcctcacagaatagaacagggtttctcaaattgcacacactgaactctgcaacacaacagttccttcattggagaccagatgaattgaaccactggctttctgaaaataactgtatgctttccagttggccagccttggcagggacccactactactcctatttctcaacagtcaatttaaaatattgacagtagcttaataacattcaatagtaacttgcagcagcctttcatataccctgacatctgagatatgtaccagtttatgaaatagaacacgcagatggtcttagccccattttccagatgaggacccttgtccagggaaggattggtgcccatttagctagctctttcccagcaagcaacagtacccaaggctccatgccccaggcctgggaggacccctcccacggcgtacttcagatctccacctgtgactttgaacacatgcttcgaggtgatgtacttcttggagatagtgctttcctcatctcttctaccttgtagtcgtcagtagagggcatgcagtgcaacagaagtggatttcaggactgagactagggtgaggcaagagaggcatcagaatgcaaaagtgaagtagacacctgccgtcagcactgggcagccctgctcctggggccttacttgactcatcctggtgggttttccaaatggcagaggtgcacaaccacttcttgcaagcatgggcacttgaattgtagcccatgtacacagtgattcttggaaaaagtcatgagtaatgaatggaacttttctctcccaggttgatcttgtgttttgagacataaagagtcaaaggttggtgcctaggatgctcattcttattgtttttggtagtttgattgttgaaggcttttgacacgacattgaagtgaatatttggggcattttgctcctctgggcttttctctaaagcaccctcacatttcctctctcatgttcctgggctttcctggctttgatgctagccccactgtgtgttcccattaatagccctatgtagcctggctccttattctggaaactgtgtaacttttgctcttgatcttaaacacaactcagtcttgcaaggagctccgcctttggtctcagcttcttggggatttccctggcagccacatagtgaactatgtcacactctctgttttacccgttaataaggaaatactctggtacatggagctttgcttgctgatctttttctaagtactctgggggcaaaaggaaaagcagctagaggataaggatgtaactttcttcaaattaagccatcctgacccgtggtagagattagccactaagaaatagtggaaacaaataactgtttcactcttgagtgttagcatggaagagattctggttgaaatcctagtcctgccactttctggttacagaaacttacattacttttcttttgatgtttcaaggagataggagttaaagaaaaatgaacaccagattactagaacattcttatagagttgcccaaagatggaatggacaccttccagagtggaggggagggagtaggattggacagtagtcctcaactgggagcacttcttccccctgaccccacacctgcctcccagggacgtttgacagttttggattgcacaaaactgaggggtgagagttgctgctatatctagtgagcagaagccagagatgcttccaaataccttacgaagcataggacagccctcacggaaagaattatctagctccaaatgttaatgatgctgactttgagataccctagtcagaagtaacatttattggccaggggcagtggctcatacctgtaatctcagcactttgggaagccgaggtgggaggatcacttaagcccaggactttgagaccacctggacaagaccctgtctctacaaaaaaaaaaaaaaaaaattagcctgatgtggtagtacatgcctgtagtcttagctactcaggaggctgaagtgggaggattgcttggacccaggagtttgaggctacagtgagctatgtttgtgacactgcacttcagcctgggcaacataacaagactctgtctcaattaaaaaagaaagaaagaacatttgttgaatctaattttcccatgtaatatcaatgactgtgcaagataaagtggtttttatcctcactttggatgagattggcctttggtgattgagaaaccttcctttggttgttcagctacttctagatagacatgggattttaaactagccatctatatgtccaaaacccatccgctttccacaaacccattatgtagttagctccccatcactgatgatgttcaaagctaagcagggtgagcaaccacttgaaagaggggatggatgaggatacaagcctaagatgtatgttgcactaaatgacttttgaggtccctcctaaagatcacattctctggttctattttgaaatgggatttgtctttttagccccagtgttagagtggcagccagatatcccttggctatgaccagtgaaatccctgtgctttgtgcacctgtgaatcttactcctattaatatcccagccctatcaggccagagggctagggttccaaacaggggcagccagaaatgcaccatcttctgcatcccatctgcattccgggcccaggcagttatttttacctccatatgtaaatgggcccagcgatttctcatttaggagaacagcagaggcacaagtgaggagagctggagaaggaggggaacctatcatatactctgagattgcaatttagtatcagtttgctgatcagtgtcactccactagtttaataagtaattatagtttctcttttgtgaacaaggaaaacgggtagcttcacccagtggttgtcagccctggccaaaaattagaataagatagagggcttttaaatcacacctacaactgagcccctccaccagaaatttaattttctgaggtgaggcctgggtacagtgatttgagaactttgcagggattccagtgtctaagcagcctgggcacctctggttaatggcacacctcagtgctgcgcattctgctccagtacctgctggtgttactctgtcataaagagactagaaaaagagtgagttgggccctgtttctcagtgtgtcttcagtggattgtagggagaaggaggcccatactctctgcctaaacgagcacctgctagactccgaaatctagttaatggaagtttctcctcatccttggacatccttgttttatatggtatacgttcaaaatacatataatctttggtttaatttgttttacaaagttttgaagttttcctctccacacttttctcatcaagctggtgtgtggaaagaaggaatttttcttttccattgctgtcatctaaaattgttgtgtcgggtggggaggggagggagccgggagacttagctttaactacttagaagttttcagggaaatgtttttataacaacctagttaatagtttgactttatgatagattctgttccttcattattttgtcctccagtggcttttatacccagcaaagtggaccatggtgtatgattcaagaagggtgaggagtatgtctttctttggaaaggcagggatggagggttgtgatttagaaagggtaagcaggaaaggagagccacagaaggcaagcactgttctcatgccagatcggtttcaaggaagaggacatatggaaggatctagaaaatgatttctctagaattgtccatgtccaagtcccctggaatgtctttgtatatccccagagctgtgcatgctccagtttgaagagctctgctttaaaagatatcaggggtgggggagatgaggggggtgaagtaaaagaataaaaactattcaattccatttgttttctctttcaagctcatacgttactcatttcatttttatattaaaatatagatgaggaaggaagggcacatggcaagatttggcaagcataatccatgaggggatatggagttggggatggcagcatagcatactaggatttttgaggagggattcggggagcctgttcatgttttccttacaactctggtacatgaagtacaggttctgcatcatgatggaagactgcctgggttcatgtttgggccactacctactagctctatgactttgggcaagtttctttcttcttttttttttttgaaatggaattttgctcttgtcacccaggctggagtgcaatggtgcaatctcagctcactgtaacctctgccttttgggttcaagcaattctcctgcctcagcctcccaagtagctgagattacaggcaaccgccaccacgcccggctaatttttgtatttttagtactttagtacagaccgggtttcaccatgttggccaggctgttctcgaactcctgacctcaggtgattcacccacctcagcttcccaaagtgctgggattacaggcgtgagccaccatgcccaggcaagtttcttaacctccttatagcagtgtttggcacatgatagatgagctacaggttggcttgttattccttgcaatcctgagtttctccccagagtaaagctggagcttttcccccagccaactttggtggagtccactgggcagagatgtgatttcagccaaaatatggctaaaggaggaaaggatctgagacagccaggtggaaatggctccccgggagagcctctgaccgacccgcacactgggaggagtgcgcactggggtggagccttgggaagttggagccatttgcagcagggaggagcctggcccctcgtcttcttggatggtacctaggattcagtctgcgaggcaggaagcacactagcaggactccagcttggtggagagttcctgctttcctttttttcctttttgtccaataaatcccatttttctcaccctttaaattgtgagcctaatttttcgtagtcatgtgacaaggacccctcttaagctgaactaaggaaaagtcctgcagcagatctaactagaatgccaatgcctacattgaggctgtttaatggagagtttatgaaaagttagctagtgtccttgtgtaaacctgtatgactctagttcagagtcttcagtaattgcaattcaagaataaaaccacacggcacttccattcccgtgtaatttgttgttgctggcttgtgacattctacatatcccaactatgagacagccaggcagtgggatggactgtgaggttcagatgcccggagatatgtgaggaagagcttttagcaataaatatgaaaatgaaatcaaagtaaaaactggcattgaacccctggtgtacttaggcttacttttacccaaatccaaatcatttcttgacactgcatggttaccaagagtgtctgtcattcaatatttcagattaagatctgttctttggtagctaagttcagagaaaaaaatataggatctagaagtatcattgctattttttccttgatacatttagtctggtattaaaattgcttgcagaagatttgattttaaaaaagtagaaaagagacacttatcctggtaaaattatcctgaaatcttaagaaattaagacaaattgcaccataaaaccagaagcacaaaattaaacaatattatattaagagaacccagtgacacattttccttctaaattaactttaaaattaacttttaaattaagttcaatctcatatcagtttgctttgtaagaaatagaatatatgtacatgtttgccttatttttagcatgttatattcattaaaatgttttagtttattcagcagatacatttagcatttctttcacaagaaagacagtgaaggaacaattaataacaggaccccagtaatacctggggggtttctacatctgcattttttgcaaaaatagaatagccttctaagaagctgtcagtggcatttgtgcagctggacagctttgcagcagatgtaacagtaactgtgatgccaggctgtgccccagaacctgtaagcatgacaagctctggcttcttccctcctctgaaaaggtacaacattgaagaggcagtcgtttcccctagatctgtaaccaagcacatctgggtgaaaggggaagacatctcttcacagagaggagaataaaggcggtgaccatcagggtgacaggcagcatggactgttgccacctgtgctgcaggcagcttcagtgcctggatggtgggacagctggtcctgcactcagcacgagtctcaggcagtggtctggccgcgcctcccttgggctgcttcttcctccaccgtcctccacttttgctttgtgtctgcgtcaagtcagtaacgttggtctgcagctcccatccctcctgatgggcactgcactgaggccttagtgggcattacctgatgccctcatcacccagtgtacaaacacctgctgacaagaagcgtccctgagcggaacccttctgctgggacaccgcaccttccgtgtcctgagtgggctgcaccctcgtggtgctcaactgggtgacttcacgctgtcctcagcgctgtcctcggcgctctctctccagtcagctctcctgctcaggcacctttttgggacacagtccttgccagttattccctgtttaatgtcctcatgtgtcttcacttgccctgggagactgtcgtcttgagagagcaagccatatgggaccctgaggcctggcctcagtttccctcccccccactgccccacggggccacgcctcatcagtggcatggaccttttagtcagcgagccctcagccggatgctcccgtgctggccactcctgtcatccctgctctgtcctccctgcaaactcctccctcaggaccctgcttgaagttacgtcctgcacagtcatccctggccttccctcagcagaatctgtcactccctcaaggtgtccctgcagtattctgctcatgcccctgctacgtggcagaactctgttgtcctatcctgtccagagctccaaagcccccagaccctgtggctgctgagcacttgaaccatggacagtccaggtgaggatgtgcggggagagatgcctcctgcctgtggctgagccctgcctgaaggagctgatgaggaaaagctcctaagcacaacagtgctgctcacctgggcatctagttggcagagtcctatcccagtgttcgcacccccagtttcctgggtcttaagttcagattatcaagtgctcctcctgcaaaaaaaaaaaaaatggtgattcttgtggcccttagttgaccccgcacctgggatatgcttatatttggtgtggggcagagaactgagtgttcttgaaccacttccacccaaccagagggaggtggggacatcaggtacacctcatcccctgatgtcacagccaagtacctggagccaccaggactccctctgagcccacaaaggagtgtcttctcaccaccccgattatactggtctagttatgctttggagttaaagccaggctgctattgcagggctgctgcaatccttgcaagcacagttgttctttgcttgcgcttgctctcgctctcgctctcactctcactcttgctcgctctctttctctctctctgacttcagtttaactttttaaacttcagtaataagtgttcctcaaaatagatggtcttcctggttgtaggtacagccagcagggttgagttctgctgccttccagcatggttttcctggggcctgtaaaagtcctgcaaatttgctctgacactctgttgacatggaggtcctgtttgttgttataaataaggaccagtgtctctaggacacaccttactgtgtataactgaatggcagattttgtcccttacttcttaaaaattaaatggcagaggagctggccatgtaaaagccctgtgtgtgtttaccaaaaagtacttgaattttgtttgggttttgtgttctggtgcatatgaagtgaattttggtaggagtatgtgcattcagagaatatgtcatcacacttttttctttatttgagtgccacttggctcttatttgattaaggtaatttcagtgacatattttgaagcaattcaccttgaaaggcagaggcaccacccaggtgcagaaaccttccttgggttatgcaacgcccagcgtgggtggaaccgcactcacactttacctcttcctgaaccacagccctgctctgattgcatgatggaagctgaggtgcctgacaagtggaaggaggaaaaggaacattctgccttccttttctctgtaatgccaaagctggcgtcatgcattactgagggcctctgtcagcactggggccggccagtggcacagctgatggggtagctgcactcgctagtcctctgggaaagcccaggttgtttttctggcttagtgttagaggcagctgtgatgtttacctcgatctgtaacatacaaagatctgatcatatgctgtctttgcttacattctattattgtctgacttatgttctaaattctctacaattcccttccatttgtcttaagaaactctaaacctttttttttttggaaatcactacttaatgattttgaggatggaaccccagacagttggtaatagtggatggttttccttttctgtagttgagtggctttctaattcttttgatggcacacaaaaagaaattaaccttagatcacaacttagtacacacatttatgtatgcatgtaactgagatgagttcctcaaaatagcacatacctgtgttttatgtgaggcactgatattttctgttctatattatgcttaactttaaaaaatacttcctgtgtaccatttgtgggactgtaactcacaacttaaaaaatattaccttgatacatagctccagaaatacacatgggtcattttaccaagaatcaccagtgcttttgctctgttaccccggctggagtttggtggcacgatcatagctccttgcaccctcaaccccctgggctcccagctgggggtctttaggaccccagcgtgacctgtgggtagcccttacttcctttaatacttttcttctgcacagtcaggtgctctccctttgagcttccgtgtgaagttcactgtgcacccagctctgctaccaccgcctctgtcttgaaaggaatagggtggggtggtcattggtgtatagtaagattcgaatcacatccttcaagtacagttctaccctaaagataagagtccctgtggtttttgttgttgttgttgttgttgttgtttgaatggatgtgttctttgagaaattgagtcttgagtattttgtgaggacatctaagcctggcgtccacgtcagtgctgacagatttgacctagtgtgcactcccatctggggaaatgcccataggctataatctctttcactggagcgattataatagcccccgggcttcaggtcccagtggcatccacccttggtggcagcatacccctctgcatgaacagggcgcccacttgtcccctccttcttacttagtagtgatttttaaatgggagggtggcagtcctgaatgtagttcatcagtatttaccgcacaagctctaaaggacacagtgttttatttgtgtatttatttaacttttccaatatcggaatatgaatttttgtttcacctgataggacacgtttcaggggctccattctacattgtcatttcacaggaaaaatatttgatggctcattagaagggaacatctattattttgttactgaaaggcacattttcaaccttgagaattggatggcaggtaatggcatggaaattgacagcattttaccacttaaaaataaccacaagaaataccaatgttcaccgaatgagttgaagttaatttggttttgtaggctattgtagttaacttgatgcttgatggaaataattttgtattggaaatcattaaaaattgatttgattaatgcttttataatgttggtatgaggtgttgcactgtggtggtgatgacctaagggtgctgtgatggcctcaaacgttgtccctccggggcccacaggcaggatcccacacactagcacacctcccagttcctcttaccatcaaacagaggtgttccttcaacatgcctgctcctccctgtggcataaaggcaccaggaggttctctgatcccctgttagatctcctctgcagggttgaagacattttttgtttgtttgtttgtttgtttttgagatggagtcttgccctgtctcccagactggagtgcaagtgacatgatctcaactcactgcaacctccgcctcccgggttcaagcgattctcctgcctcaacctcccaagtagctgggactacaggcatgagccaccaagcccagctaattttgtgtttttagtagagatgggatttcgccatattggccggggtgatctcgaactcctgacctcaagtgatctgcccgcctcagccttccaaagtgcttagattacaggcgtgagccaccgtacctggccatttttgtttttaatcggtgtagtgtccctaacctaaatatttcacatggcctgaactttctgtagttttagcagcaatgggatgctttgaaacctagatctctcaccaactacatcttccattgactggtgaaacactagtttaagccaattcattttgaccatgtgcatttttgtgcttgatccctattttatttcaaaaataatttccatctctattcatgtaaactaataagagccttccgtttcctttaatggcaaattgtctcatcttttactgttttaaaacatttttttaacatcatgagaaaacgtgataaaaggtataagtgtagtttcctggcttttgcagtacctcagggaattcggtaaactgtattccatttgaggaaaggaacggttggagtaggaggtagtgtaaagataacatagcaaataagcattttaccagaaccctctgaagtctcatcagactgtgccatcatcagaatccctcccttctcatctacaccgtttaaagccagcatccagtcagaagcccagagctggtaccgccttgctttcctgccagttgctgacatatggcacacagtgtcagttaagggcacaggctgatgggcagcttggccacatacctctctggcttcctatctgtaaaatgggcacaatcattgtacctgcctctgaaggttgttgcgagaactagacgcagccttggcacagagcccacagagagtgagcactgtgtaaagactggctgccagccattagtactgggtgcctgtcttttggtgtctgggcaaagctttaacctgttttatcagtttagaactcagatgtctccctggcaaaacaacacgggcatatagatattttgtgaagttttgttgaagtgcacttaggttaatgattcatgggcagcctttcaaagctatcaggctgtgaaacagctttgaataagattgtcttgtccttctgctgattgtcttttccttcccacattagcagccatagcaggaggaggagaggtggcaagtggccacactactctgctcacattaagcagacaatttatggtcaatattcagtgaatttcttttttttatagtacagttaactgatatttatattagctttaaaattatagcaaaatcaggccaggcatggtgactcacacctgtaatcctagcactttgggaggtcgaggagggcagatcgttggaggtcagatgttcgagaccagcctggccaacgtggtgaaaccccatctctgctaaaaatacaaaaattagctgggcgtggtggtgtgtgcctgtagtcccaattactcagtaggctgaggcaggagaatcgctttaacccaggaggcggaggttgcagtgagctgagattgcaccactgtactccagcctgggcgacagagcaagagactctgtctcaaaaaaaaaaaaaaatagtgaaatcagccaaatagagaactaacaggcacactgcctaattccttgtgtaactgtcattggtgtgagtcactggggcagcgtgattaggtctgtgagctggatagcaaggctgtcattattctcaaggccttctgctgactgctgctcttggtaagacatacagaatctgtgggcacctcctcttaccgctctatgctagatgaggcgtctccacgttgagttgtagtagatacagctaagaaagtaaaagaaatgaaaatctcatcaaaaggattggggctagtctcattcttcatgcatacccaaaccgtggtaactttgatttttttattatccagaatggattgtttagaggagacagatggctttccagttcatcaaattttttcaattatctaaaaggaattcctacgcttggagcaagtcatttcaataaatctcattcatatttacctgctgcttccttttaaatggaagaagagaatgtttttcaagtacacttgaaaaatagcatatgtgaattagaaacttcctctgtaaactagcagagtagaaataagaggccaggattcagcaccaggtaggctggattccttcttaggtggctcaagctggctatggggctggtctcatcatatctaaagaactgcccagcttttacgcattttgaatgtggtggaaccagctgcatctttttatatgagagcggcaaatagtcattgtgttccagtttgcttctcgggtcatctaaacatcagaggccatgccacaagcaccgtaactgagggatatagtgtgactgtggtccaggccagtgacctctggagctgaatcatgacttcccagatgactcccagagcctgagaggggactggtgcgtggctccaaatgattttcacctgggcctctttgaagtcgggagagatacgtgcagtatggtagatgtggagagggagaggcatggtgtgtccaaaaattagcaggacctgatccatatacgtggactctgaagcagtgcacttactagattaaaaaaaaaacaatgtacttactggatttaaaaagtgtgtatttttttgtgagatgcagtttgtaagatgcattggtaactaggccatatactttttccattggctctcagctctcaagaagctctttagtttttagcattggatcagtaaacacttattaaaatgttcccagcatttgtttgccatcttctctttcagctgggcccagctgtgccctcaaaccctgcctgtctcttccctgactgatcatgttctcccagcttctacagaggcttccatagcattgtgcttggtagcagacaccagacagaatctcagccagctcagtccaggcgcacgggctcctggtctcccggggtgtggttactcgtgtctcctcggggccttccgccctccacattccagtgccaggccctggacctttgtctctattcatgataaaacatttttaggaaatgctgacgctcagtgaagaaatggaaacactaactctttgttctcttcctaacagacacgagacgacttcctgggccaggtggacgtgccccttagtcaccttccggtaaggacagtctcatgtttgatgcttcgtgctgggggcgggggtttctaattgtttgtagtcagtgtattttcagagtggcatttcttcaccacggtgaagaaggctgaaatgaagcacgtgtgctgtggccttagtcctttctggaaagtggtcctttcaaggggatggaggagaagctggctgtaagagtagtcaagggtgcctgagtcgtgcgcttgcgttcccatccaccagctccctctcttttctgcacttcagctgctccacctttgtgtatcacatcttacaaaacagacacctccttcactcaggcctcccttcttgtcacttactgtctctgcttcctaatgcatcctccgggtcccatcagatgtttgcactctttgtctggaaccgcacatgccatttctcttggattcctgtacacaaactataatagcatttcccagattttggtgtctggctttctcagtcagcatggtgacaaaagaagagcctgttcattctgagtgaacttgtcagctgggaacacccaccctcgctggaacacgcactgagttagcatgtgtggtgctgccatttctctctgctcaaagtagcggagcagtcgaggctgttgactagtgacgggcattagggctgacacccgaaacaggaggcagggcagacagaatgtgtaggtaggacctggaggccttgagaaaggtggatccccatctcctattccagcttcagttttccggcttgtcccagccttcctcctggccttcttccctgggcagcacaacgacgtgatagaagtagcagctgagagaggaaaggcgaatgtttctgccttacaagggcattgtgttatttttttaaatgctttgtgtgagcaaatagcataaatagtctataaagtaaagtgactttactttatttactttatttaaagctatttaaagctagcataagcttcctgctgtgtggaaattatggctgtttccatatgttaaataccaagtaagctttgaagatgtgttgtgaaggaaggtgatagcaagtaatttactcttactcactcaggggagctgttaaggaagaaagtcgcaaggttccaaaggactggaagtgaaagtgatattcttaaaatatcttgtttgtttctttttaaaactctgaagctccagggtgccacgggaggggcctgcccagggcttctgcgtgagaactactccatgagccatcagaaacctgactgctcttctcaggtcacgttgggaggatgtgactatttcaccttttgtgagcaaagacctcgcatccttctacgttgggaggtcttctgtgtatgttcttcagactgaagctgcgatcctctcacacttttagacagtgttggttgatgggccagctcttttatggacgtctccagccaccctttccctaatgtaaaaaccacatcttggccaggggaaattattttctgagaggcaaatattctaatatttggtaagaggcaaaagtgacatgtttaaaaaccttgctctgacaagctcttttttgagtgagtgagcagcacctggtcttgaaaggttgagtagggctcccagaaaatagaaaaaggttcctcctccgaggccaagtcagtataaagaatagtttagctttggattctgagtggaggcagggtcagtgagccttcaaagaaggaagcggtgcagaggcacagggcaggaatagaagccagccgattgcagagggtagagccgtgaacgcccagagaggaccgagtgcccctagttactcgtgtgcccagagggtaacttgcagtggcgtgcttcacctccatacttcaaactgactagctgttcacagccaactatagtcagagagatggaccacaaagaaaacaaaaggagaggcgtgaaggtatattctttattcatgtggcagtagaacccaagttgcgtgttctgaatgcacgtggcttttgaatccaggatttcaggtgctttcgtgtgtatgtttggtcgtgtgtataggatgctcatggggaaattacagtggcattctgtttgtgtgatagcacacaggtatgagtgtggagagggcgggagcatatgcgtgtattttgtggatcgaattatggatgctgtgttcttgattagtatatgaccattgtcaaggtggattattaacagtctgtagattcaaaatttgtcaaaaccaccaagctttagataaaaggaaatagaccaggcacagtggctcatgcctgtaaccccagcacttttggaggccgaggcaggaggatcgcttgagtccaggagttaaagaccagccttggcaacatggcaagaccctgtctctatagagaaacttaaagattaacccagcatggtggcacatgcctgttgcctcaactgtttagaaggctgaggtgggaggatcgcttgagcatgggaggtcattactacgctgagccgtggttgtaccactgcgctccagccttggagacagagcaagctctccttttgcttttacattcagagaccaagagcaaacttagctgtaactgtaccatcattgacttttcaactgccgttttcacatttgtctgttaaattcagtgcatcgttgtctaaaaattcatatgatatttgataacttgaatctattaattatttagcgataaagagaactctgagatctgtattaacagagtgagatttctggcaggtgtctgcctgttgcaccttcctcttgacttgtcagctctgtctccccttcccctggagccctcagtaacccacctttgcccagccacaaaatctcttcgtccctgggaaaggcagtggggcagagagagctattttaaaacattaagttttcctaaatcccagtcatgtgccacttaagacaaccatggctgactctggaatttaaattttcctagatgaggcattttcagggtggtggtattatttgatgccctgcctgtacttggaggtagctcagctgaccaacatccttttaccccttttgtgtttatggctgatggctggtagcaggtagcaggctgatggttccctctcatgagtgcagaattcaaaatcatggagtttggagggacttcagagacactgattcactcccagtattttccaggtgaaaaagcctgggcccagagagggaggggacttgcccagcaataagcaggtcattggtggtgctggatctgaccctggctctccagcatcattgtgagcctgtgatgtggtcaagggtgtgggcatggggtggattcgcccaaggcttaggtgcttgcagtggttgcatacaagtttcgagtctagggacccagcagggccctctccttccatttgcctgcagaatcctttatctcactctattccatagtgaatgcacctaggctgaaagcaactactctctttcaagatgaaagtactgagtatccagattttcttctgaatgcttttaccctggaacgggggcagcattgtggctattgtggctaatagcactgtttgcagcagtgtgtttaagatggctttccaccaggagcaccctcaaagccatcctgggaggctccactcagctctgctccagggaacaggatcagattggaacctggatgaatgccaagaagaatcttgtagttatctataagatcatcttctaattcaggctagagaatttcaatgaacgtgaactttgattttaatgccctacctgttactgcttggcattgagttggcagtactgacaaatgatatgaacgtgtagaattggccaatgaacatggctagtgtttgttgagtgtgccaggtgcccttgagaactttatagaaaccaactcagttgattggtttgatcctcacaacagccctgtaagttatggttactgccccattttatagatgaggacactgaggccaagagagataaggaacttgcccttagccacttggctctgtaagtaacaaagccaggatgcaaacctaggagatctgccttttgacctgtgtgatatcagtcatttaagctgcatagggtatggacagactcaggttcagagtccctctaagctccgtggttttccctcttcactctcttgcatgttctctgctgctcctagattgctcatgcccactggtgatcctgtaggctttgtcatactgtttgatttcctatgtttaaactgtcctttctccctgttctctacctctcaaagccttcccatcaccctgtattgtattgaactccacatccaaaaccattttgatttccaagtcagagtccgtctgttccctgtaccccaagtctcacagaatgtaacctctctgtgtcagtgaatttgttctgccttagcttctagtggattgttgacatgatggctcttcccttgtaattgtaaccataaggactgctataccatgttgtatccacatgtcgttgacataatattgctctcaaattatttgttggttggcagggcatggtggcttatacctgtaatcccagcactttgggaggccaaggcaggaggacgtcttgagctcaggagtttgagaccagcctgggcaacataggaagacccccatgtctataaaaaataaaaatattagccaggcatagtggcacacacctgtggtcccagctacttgggaggctgaggtgggaggatcacttgagcccaggaagttgaggctgcagtgagctatgattgtgcccctatactccagcctggacagcagaagaccctgtctctaaattaaataaataaatgttggtttaataaatgaaaaaaggaaggaaaaccagcaatagttttcttaataaattatccatttatttccttatatatatttacaaaccttttggtagaaaatattttcaaaatgtatgtttattactgcctcataagaacagtctagaaaatataatttacttcattcaatgatagtgaattttgagagcctccatagtttactacagatcagatgaattgagtgcttacgtgagtacctacttggtgccaggcaatgttcttggcaccggtgatccaatggtgagcaaattcaagtctctgttctcatgggcttacattctggaagtgatggataataaactagtatgtcaacaaatgaacaggtactttcagaaagtgatatgaggaagatacagcaggacgataggatggggggtgataagggtggctgatggtgggaactctaaaggatgagacctgggatctcacacttggatggcaaagtggaaacagccatgccatccagagtcagctgtccagcagagggacctgcctgtgcatgggccctactgcagtacatataatctgcatccatggcagatgaggacaggatggttgggagtacaaggaaggaagagagagactggttcccaatgaggttaaagttgattcaaggccagattatagttggtcttctaagtcataggaaagaattttcagtttattatgagaggagtaggaacccattgagagtttaaagcagagaatgacataaacagataacatttcaaatagcagtgcatacgtacatacatgtgtgtgcatgcacgcgcacacaaacctgatacagtaaatcactggactggtttatctcttgctataaaagtatttgaaattgtgtttaattgaagggtctaggtatttgaggttttactgaatatatagtatttaaagattaatgaaatagtcacacttatttatccaatttcctgctttggtaggaacttcacaatgaacttcacacaatcaaatgaacactgatttctttaaaaatgaacaaatactccacttgtactcatagcttcatgaactgaacctcagcagaaggttgatcggtgctgcttcctggggtgatctctgtgcaggagatagtctttcaattctcttaggctgatgatgtgagattttaatacaaaaaacaaagtttccctcaaagattaaatcttgtatattcttctgtttactccacccatatgtgtctcgagtcacaggcatatagcaaggcactggtgaccgctggttctccgaagtgaatcagctctgtgagactgaggccacaccctgcagttagaaattttacttggcaatgacagctgtaattttgtcatttgtctgtggctggggctggctcctaaaacccggtgtggatagtgacatctagtggatctctagtagatcagttccgtggactgtcaggtaccaagtgaagaaacacattcagcggtgccacattctaaaattcaaaatatattctctgtaatccagttgcctgtatctaaaacatgaaattattaggaatattaaaatttaatttactgttttttccccacagacagaagatccaaccatggagcgaccctatacatttaaggactttctcctcagaccaagaaggtgaggcttgtgggtatgggtgggtggggatgcctgccctgcatgctgtaggtataggtggggatgcctgccctgcgtgctgtggatatgggtgggtggggatgtctgccttgcttgctgtggtgtgggtgggtggggatgcctgccctgcatgctgtggggatgcctgccctgcgtgctgtgggtataggtggggatgcctgccttgcgtgctgtggatatgggtgggtggggatgcctgccttgcatgctgtgggtgtaggtggggatgcctgccttgcgtgctgtggatatgggtgggtggggaggcctgccttgcatgctgtgggtataggtggggatgcctgccttgcgtgctgtggatatgggtgggtggggatgcctgccctgcgtgccgtgggtgtgggtgggtggggatgcctgccctgcatgctgtgggtatgggtgggtggggatgcctgccctgcgtgccgtgggtgtgggtgggtggggatgcctgccctgcgtgctgtgggtataggtggggatgcctgccctgtgtgctgtgggtatgggtgggtggggatgcctgccctgtgtgctgtgggtatgggtgggtggggatgcctgccctgtgtgctgtgggtatgggtgggtggggatgcctgccctgcgtgctgtggtggttggcttttgctgaagacgattttaagtgtcctttgaagtcacaacccttctaaccaattttcttccattatgtgtgcagtcataagtctcgagttaagggatttttgcgattgaaaatggcctatatgccaaaaaatggaggtcaagatgaagaaaacagtgaccagagggatgacatggaggtacgtggagggcgtcaggcctctctccttgccttgagatcatattcatgttttgctttcaaactttataattgaaggaaataaaagtttagaaagcttaaatataaaaaaaagtacatatgtccgcaaattggtcattgatagtctaccagtgcagttatttgttttggttaaagatgaactttttatgttacaacaccaatcctcggagagatttctctttagacaatgccatgcctattccccaattttagccccacagctctgtgaaagtctcctcacacattgaatcctattattgctatggacttgcaactctttgtaaattctttttagccattgaggtcgcttcaaagtgggtggaggaatttagaaaatcacttttttttcaagtttcttactcatttggccacaggtgacagcctgcagtagaaaaaccctcctctagaaatgccattctgcaacgagctgaccagaggaatgtcccttttttccttcctgacagagccgcctgtatttaccttgtcacagactgatgctgtgggtcctatcgtaccttttcagcacacacctcggccagtgctgttttgttaggcaaattctcatattctcaaagtgtccattaaacgagacctctctagggcttattctcacatctgtttgcagctgttgcatatatgtgatatgtgaataatgtgtgtggagaagttacccgaacactcctccgcctgagagatcatatttccaggcattatttcatttacaagccttcatctctctatatacatgaagaggaataatgtgggtgatagaaatttatgaatgttaacatttcataagcatgtcaacagattttcatctcaaatccaaggaattttttacactcttcttgccttccaaccgcagtaaccagtgaattacttaattttccagtgattttagcagaggatgttaggaagggaatacgtaatgcctaaaatacgtgctgtaaaaatggaactcgaattttggtaccatgaaacccgttggtgtggacacagccagtgtagagggcctgagtagaaggcagcagcttccagactcctggctcctgcggttgtttgggatgcaaagaggaggcttctctctcaaagcccacctccctggggagcaacaggactctgggcctctggtcccctgtgccatgagttctgttagaacacaggtgcagcgcagctcatcttccctgctccctttacctcatagaggtgttgaaaagatggcagctgtactgtgacgcacatcattggcagggctttgtacagccttggaggccctccagtcaaaataacaaacatgacgtatggaaagagtatgatgtgacttaagtagtgtcaccgactgtgcagatccaaattgtgttgtcctgcaatgtagtcatcttagagggcagcacaattaattggccattactcagaagatttttgaggcctttctagaattgatatatatatatttttttggccttcatttgggaatttactcaaatgtggccccgaagccatggctagagccagagagccccagagcaaggagaagggcatgcagggcatgctgtgatgacctcttactcacagccgaagaaccaacctcataatcgtccctttaactttattccgcagcatggatgggaagttgttgactcaaatgactcggcttctcagcaccaagaggaacttcctcctcctcctctgcctcccgggtgggaagaaaaagtggacaatttaggccgaacttactatgtcaaccacaacaaccggaccactcagtggcacagaccaagcctgatgtgagtaccgtgtgatggtcaggaacacgtgcacgtgcactgcacagctagggacaaatatggcggccctttgggacaaggctgggaaataaatcatatgtctataagagcagatggtggtgtggtacgagattcctctccatttacgtaaagcatgcaagagcagtcagaacttgtatattgtaagcgattgcctttgagtcacatgctgctgttttcaatatgagctgatttattttctatgtcttcttttatgtcgattcctgaaatacaaagcagaggttgtttttcttagacttattttacatttgttgattatattgttttcttcttcacctttctctcccaactgacccagaacagaaccggcaagcaaattggctttgcaattttctgttttctctaagtttttggatgtttactctcttcaatgcattgatttggaaacctcaaaaatttttttttctttaaggaaatttgagccccttaatataatcagaaacacatgggagagttgcaaaatcagaattagtaattactgtgtattttaatccctcaccagcctcagggatgcagtaaaccaattcctgttttgttccctcagcaatttgtggtttgattgatagcaaataaacactggttaaaactcatggactttaaaaatggttttgtagcagcttgtttttaaatcattttatacagcaagatctaagtctattgataatacatcgaagggcaaaaagaaagtcttaaggaaaaggaattttatcctagaaattatgagctgcctagcagccaagacaaggaggaaattatcaatgaactatacaactttcagtatgtaataaaagcaagtctactgggtagtataattttcttgtctactcgaactctgaaagaaagtggctaatgatacattttagacaacaagcagtatgaggtatcatgttcttaaaaaccttttatctttagaaattgtaaagatactccacatatgactgtgggtggggagggtggccaagttttctggtctaggttttgtttaatttagagataaagcttgcagaatctggaacaacgaatagcctgtcttctctgagcccccaggtgggttctcgtgaatgtcagctgttcgtgatcagctttagactacccagcacgggcattagctcaggacagcaaaatggtctcaggacagcaaaaatatcagatcagctgggtaatgctgaactatcttttgttaaagttttttcccatggaaatagcttggttgattctttttgttttttatattattgcttactatttccttttgattaatgcccatagctattagaattattgtaatccattgtagctatttgtagtaaaaatgaatttggacccaccttgggcttggttacatgtagtgactagaagaatcttggtagcaatatcctaagcaaagcaccattacctacctttgctcaacagcatgagaaaggagtactgaaaaggtagatcctcatgcgacctctgcagaaaagtggccaggagcaactcacaaaggaaaaaatcctgatagctaatatgtatatggaaaaatattcaacttcataaataaggatcatgcagattagagtttgtattttggggacaaatagggataattgctactttctctgcctcacagagttgtgaaactaacgagggaattcttgagaaaacacttcatacattttaaaatatatactatttttttgatggctccacaggtgtagacatgtccccacactcatcaagaggtgtacgttaaacatgaacagctttttaatgtgttgattagacctcaataaagtgatttaaaagagaaaccatctttggtggcagtgtcccagaaactaaaacaaaaggtataacttgctggctcttcactagtctagagcaacaagggaaaaatgcagttctttttctgttgttgtttgagacagagtctcactctgtcacccacagtggcaccatctcggctcactgcaacctccgcctcccaggttcaagcgattctcctgccttggcctcctgagtagctgggattacaggcgcccgccgccatgcccagctaatgtttgtatttttgtgaagatggggtttcactggcttggtcaagctggtttcaaactcctgacctcaggtgatccgcccacctcagcctcccaaagtgctaggattacaggtatgacccaccacgcccggctgaaaaatgcagttcttaatccaagttcgggctcacatgtagttttgggagaaggcagaggcataactgccccatcaaggaggcagcaatgccaaagggagaggctgagccaggaaggacacagcagaacttggcagaacctgaggagcgcctccttccaatgggcataacttctagaaggcaagaggaaagttagttaaggaaaaagagtttccaccacaacctctgctagcaggccctttattgggatacagtataagttcatttcagaatgtgtgagaaaactttaaaatttgtgttttagaaagagtctataatgagtgttcttgataagtactatatttcagttagtctgaaatgacgatttcaacttttgagatactgacttgtgacataatttttgttaatgggatatgttatcttattgaaagtatctgtgagagttttccctgaaaaaatttttggcatttaaacttgtacactaaaagcctctgactagtatttcccccaaagtatgattgcctataatttactgcaaaaaaaaaagttttcttttttctttttttttttgttttgttttgttttgagatggagtctcactctgctgccctggctagagtacagtgacatgatctctcagctcactgcaacctctgcctcctgggctcaagtgattctcctgcctcagcctcctgagtagctgggactacaggcacgcatcaccacactcggctaatttttgtgtttttagtagaggcggggttttgccatgttggccaggtacgtcttgagctcctgacctcaagtgatccgcccgccttggcctcccaaagtgctgggattacaggcatgagccaccatgcccagcccaaaaaagtcttccaaattgaatcaaaacttttagatcctgaattgagaacatcacatgacaaaaaatagggtatgatgttttggtgttcttcagaccccggctgacttgagaggttatctcctgatgttattaggatttttaaagtagggtaaaggaggtaaatgcagtgtcacgattttgagattctgttaaaatgagctagaaagcagctgaaaaaaattcatgttggatcaggtgtactttcctccagatgacagctttgaatttgtcccttttgtagtctttggtcaaattgctggtgaccagaagtagctgccttgtcattgctggacttctagaaggattgggactgcccagctgctgtgtgaacttgcctgtcacctctgcttccagaggtctgacttgtcactgtggcaaatgggcagaggactttgatttctgttttttattaaacactgaggtatattttgaaatgtatgcctgaaagatgctcaaaatggtgtgactaatgcattttaaaactgcatttatttgattgaaatgaaccttaacctatactttagccgtaatatggtgggagaattctcacattggatgaccagctagttgtcagtgtttgacgctgacactttagtggccatctggccctccgtgagcattgaactgtcatgaagggcccgatctcaaccacttctcttcttctctttccccctttcctgcatgctcagggacgtgtcctcggagtcggacaataacatcagacagatcaaccaggaggcagcacaccggcgcttccgctcccgcaggcacatcagcgaagacttggagcccgagccctcggagggcggggatgtccccgaggtacgatgtccccagaatggtgcaaagcccggcagctccttcttcccatgttctccagcttgattttatatcataatttcttctgtcagtaaacattgttgagaatgtaaagattacagtgacgcagggaattaattaccatctgaatattaatttgaaagtgcctataaaagccgtatttgacaagtataggtggctctatattatagaaatgggaataacattatttttatttttattttttttgaagacagtgtcttgctctgtcgcccaggctagagtgcagtggtgcagtcttggctcactgcaacctccgcctcctgggttcgagcaattctcctgcctcagcctcctgagtagctgggattacaggcacgcatcaccacacccggccagtttttgtatttttagtagaaatggggtttcaccatgttggctaggatggtctcaatctcctgacctcgagatccgcctgctgcctcagcctcctaaagtgctggggttataggtgcatgccatcacaatggctaattttttttttttttttttttcctagtagagacgggtttcaccatgttggccaggctggtcttgaactcttgacctcatgatccacctgccttggcctcccaaagtgcttagattacaggcgtgagccactgtgtccagcccacattatttttcagtatgaaaatcttaagatatttttagtttgtaatttatttttcacaggggtctaaccatgtctcattaaatgacagcttgtttttatcatagttgagctgttgaatgagccctgtaacttgtttgggtatcatatgcatatttttattgagtcgctttgacacttggaagagatttattaccatgaaaatataaatttaggtgaacagaaatgtgtaattttccctttaaatagttatggtatgttacttaaaacgttatgaattaaacaacaaattagccataatcttccatgctatcttaccagctctgtttatgtactaaaaatccattcttcttagacattgtgttaggaagatcatttagaatgcggcgattcaacttggaaaagcaaaagtaatgattccataacacattcactctaagttattttataccattgtttaattacagcgtatagcttctatgctgctcccacggtgaatcctcagtggttaaaagtaaaagaaaatccatgacaattgtttataaactccagagaagtgtgtgtgtgtgtttgtttttttgcccacacatatagtaacaagtgctggaaatcagtcactgttcagagaggcattgttataaagtggttaagagcacagcctctgtctggaaccaggcctctttgattcacatcatggccctaccacttgctagatgttaccttgggcaggttattttctgtgcctcagtttcctcatctgttaattgggggagttatcttcctcgtgattattgtgaaggttgtgtgcctcatgagaggcacttagtaggtgttaattatagttatcaccggggctattgttgttacatggtttcattggggagctgggtggatccctacttctttctagtgtttaccccagtgtctccttctctgaaagccttgggagaccatttcagaggaagtgaatatcgctggagactctctcggtctggctctgcccccaccaccggcctccccaggatctcggaccagccctcaggagctgtcagaggaactaagcagaaggcttcagatcactccagactccaatggggaacagttcagctctttgattgtaagtagtggccttgtttgaaagaaaagctgagcaatgttttattgttttttgttgcttaaggagaatctcttacgtaaatagtgaccaagggtcttccagctcccagctaactctgacattttccaaagttcctccttccctaggagaagcaggactgtactaaaattagcccaagcaggtgagaatctttcttgatttggaaggcagctttgctcacccttataccactaacactttcttggtttataaagaactcaaagaagtaaaactccatgatgtctgtaattattagctttaaccttgtagaattcctttcccagccaaaaggctcatgaaaatagtacctttatcacaaaggtagtatttcacagtaacaattaaaagccatcaggcctaatcagtcctcttaagtcatattctgcaggatttatcattctcatttcgctgataagggcacaatgcttaagtggctcatccaagacaaggtttgagtgggagatagaagacgtctcctaagtcccagagtatgaacccttgagaaatgttgtgaaattgtgacactgtcatcaaggtagcattttaacttgggctctcaaccatcagaaacatactttctagaagcttcagatgggcccaatgcctgagcccaatggaatcagtcacaaagacttccatgtttgacaatacaaaactgtgcagaaataacccatagaaaatccctgcttgtgcatagaattaagagcaaatgaagtctcagtgtttctcaagaaactgaacttaaaaatgtacaatagtaaatgatgatagtcactccactgaaaatggcatcctaaaaaaaaatagtcattactatgaccataacaaacataaatgatagcactgcatacaatgtaaaagcaagtaagtactcacaaaattgttactttttggttatggtgtttttattttaaaagacagtatacgcctctattacatgagttgcatttatcattcagttaatgtgatttcactttgaaattctgtgactttttcaaaaagagatgtgtcgccaagatgaaaatgtagtactaaatggacaggataaaagaaattgcatatatatgggatatttgaactgataaaactgttgttatagaaacaacataaacaatgaagccttgtatttaaaacctataaaagcaaggaggtaccacagaatccatggcagtaacacacctttagtaaaccaagtaaacactgtaatttttttcagcaataatcataagttagcaattctaattatttaaatgaggagctcctgaatttaattattctagatctgtgaaatatcattaagacccaaatacaatgttgtattatttcacatcgtgttcactgttaaatgagagtcaaatcggatatttgctcattgggattaccctgtattcaaggggaagaacatgagctttggctgggcacggtggctaatgcttataatcccagcactttgagaggctgaagcaggcggatcacctgaggtcaggagttcaagaccagcctggccaacatggtgaaaccccgtctctactaaaaatgcaaaacttagccgggtgtggtggggtgcacctgtagttccagttactcaggaggccaaggcccaaaaatttcttgaacccaggaggcagaggttgcagtgagccacgattgcgccactgcactccagcctgagcaacagagtgacacttttattaaagactgattctttcacagtaaccaatgtgggaagatgtgaattgtcccccatccctaccacagagtcttcttgtaccatttacttatcacaaaatattaaaaatgagtaaatactagaaactgatactatggatgaacttgccgataaggagactctggcttctgtgtgtgacctgctgctaatcttcattcatatcaattaggcttcatttaaccacatagactaatacaaacaagttagaggaatattaagacactacacagtagatctttttttttagcttgatctcactatttttaatcattcctgtctttactacttgaagtccacttagaagctaaaattggctgagcatggaggctcacacctgtaatcccagtactttgggaggccgaggtgggtgaatcatctgaggtcaggaggtcgagaccagcctgaccaatatggtgaaaccccatctctactaaaaatacaaaaaattagccaagtgtggtggggggggcttgtagtcccagctactcaggaggctgagacaggagaatcactggaacctgggaggcagaggttgcagtgaactgagatcatgccactgcactccagcctgagcaatagaacaagactctatatttaaaaaaaaaaaaaaaaagcagctaaaattataaataccagatctttcagaagtaggccaagatgatgtctgagctcctctgaatataggatgcaactgactctttttcaattgtagtaatcaataaatgttgggtagccacatatcactatttcttccgtctattcacatcacattaaaatttaccctgagggtgcatcttagagcaaactacaagactgctagcttctttctgtttgtaaagcagcattagagtgttgcagagtcctgttgagtctcctttctgaaagttttggtctcctcttacttttgccactaattctaaggaccaatcaaaattccagtctgcttaactgaaaattaaagtgaaagataactttttcaaggatgactgtccttgctctgaaaagatgtttcatttaattaccttctaatatcgaagagcggtgaatatggttgagtgatatgtttgttaaaccaatgaaagttgcttttaagaatatatttcttgatgcttcctgtcttttcctctccttccagcaaagagaaccctcctcaaggttgaggtcatgcagtgtcaccgacgcagttgcagaacagggccatctaccaccggtaacccatgctaatttccagtcatcagttgactttttgggctttcatttacaatcatctgggctgctgcaaaaagagtttttcctgtgtaaatttatttacaatataaatgagatgtttttaaatttcctggccaattgccctaggaaagtggatttccaatacagagaattgttactgccacccatctctaaaatgctggaacctccattgctttagtttttcacccaaatttataccaattttgatttgctcacttaaacctcttggtacattagttagtaattccttttaccttattgagttactatagttatgctccagtgatctgtactttgaaaacacattgagtccctttaaccaggaagaactcttctgggcgaccgtccacatgttcctttcccttcctaatgacctgaagtctgaactctacagagcctctgtaccttctctttaaaggcagctctgctcaccaggaattggctataattctttccaactctctcatcattttaatagctatcagcaaatgtagaggtgtaggggattttgtaacatctgatgtatgtaaaaagaaatattcaagttggaaggcagactagaactgccctgagagatgtttgatgtacacattaaaaataagaaattttacataaatttgtttcttcttttggaggtgaaaatatgtggttttaatgtgttcaatttgatattttaccttgacagtttttgtctgttgctacaaaaccttgatcatttttaagactaataatgtattacgtatgaatttgaagggggaaaagtgcatttaaggtttttgaaatcacagtgtcttccctctcatgtatgttttttcttgacttcaaaggatattttggcctaggttttaattttttatgtttgagaaaaaattaatgagtatactagtcaaggaagcagtcaaaataatagagtcatttgtgacttacactggagagacttaataataagcttgataagagcgtcttttctgggatggtttcagtacagggctcccaaaaacaaaataatcaactgagatggactggtaggatccttctcaacctcatgatctgtgattttccttgaacgaatggcactttctctccttttcaaaatcaatgtcaattttatttcccaaagaactcactttcctggaaactggtgattcctccctctttctttgtactttctgatgctgtaaactcactgatcaccagtggcctcttgagttttgagtgtggggagatttcagaatctgctaattatttgacaatggcaggcaaaaccagaccagctttccatttttctctaaggcagctcactcttttgaggttgtcattgtttacccaggtcaaggatgagccaccttggggggcataggggtcacgcttcctttgtgctactggtcatcagcgactgctggctttgtctggatagggtgggtttcagggattctgatctcacgtcacctgccttacagcgctgccacagcagtgggccctgattcagacagcagggggtcatcccctaagtgcatttcactgatgtaaattatcattcacagcccagtgccccagctgggagagcgcgttcatcaactgtcacgggtggtgaggaaccaacggtaatgatccactttatcagacatcaatagcaagaggccgtgaggcagttttaatatttcgtgtagtggtgaatatacgctgtttttaaaaataagattagctcctttgtgctacagagctgcacacgtttcttattttaagcttctcatttggggattgtttaaaggtactgggtaaaatagaatgatttttttagtcccacataattttattaggaatactatcaggctttggttaagtgcatttaacttgaccatttagaagatatttttgacttttagtgtttgtactcctgataagtttttccatttcattagaatgcttggttaaagtaatttggttggaagatcatcaaagaagccacaggaattgcatgagactgtgtgtgtgattcctggatgtgcccagggcccttctcttttctgtatctcccctaccacatttttcacagggggttagacttttcttgtccccagaatgcaccatgaccctttctctgccaccaggggctctcctcacacaatgaacaagtttccgtaattccaagggaacataattaggatatataagtgatctagaaaaatttatgtttctctaagccaaccattcttattcattattttaaagaatgtatggtattcctgtctgtgggtgacttagatttgtattttaattgcctgttttctacttgatccctaaagttaggctagcttatagtttatgcttcgcactgcaatagctgtttaaagaatttcctggccgggcacggtggctcacgcctgtaatcccagcaccttgggaggctgaggcaggtggatcatgaggtcaggagatcgagaccatcctggctaacacagtgaaaccccgtctctactaaaagtacaaaaaattagccgggcgtggtggtgagcacctgtagtcccagctactcgggaggctgaggcaggagaatggcgtgaacccgggaggcagaggttgtggtgagctgagatcgcaccactgctctccaccctgggcgacagagcgagactccatctcaaaaaaaaaaaaagaatttccttattgtttcacctgtgttgtattttgctataactgctcattacttgtggataactttacgtatacaattgctgattttctaaagatgttgatgacttcaatttaatgctcagcattgtacagaggaaaatcaaactggcaacagtcagccccagaacactcagctcaggttaagatattgagctacagtggtttacatgagtcatgtgttgagtgaggcagcctccagtagaattcaagaaattctacatgaactattacccaccgtgcacttgtaatttctgtgggagtagtggagctttgagggggacaagatcgttttgtgagataattttagttgaattcagtgctgatgaacatcatctgtatatcacctatttttgtattttgttggccttgcaacctgcgtgtagctttggagtgttgtggtagctgatgtagtaaatgaagtaggaatggaatcattgcagtaccaggctccatggcaagggtcacctggcaggacaaggtgacccctctgaatgagatcccgggtggcacgttagactgccattttcttgccttcttgcctgcactctcccctccccgtcactgagtttcagcatgggttgggtgttttctttccacaggcttggcaatattcattcctaagtgtttcatctactttggtagatgtagatagatctccctacctacttaggtttgaaaggatcacatccatttctcttctgctgtatcctgcatgtttctcttccacatcctttgtcgtgaatgcccttgacttcctgtcttgcaattctgtctcttcaccccgtgtttccctctttggcatcccctctgttcctctgcacatcactcacactgaagtgtattgtcctgggctggagccatcatggtattatatcatctcactgcccctgtgctctcacagacatacggctgtgtacacataggtacacattgtgccactttattttattttttttaaatgggatgtcatgtatacattacttagcaacttggtttttttttaacttatgttcattcttctgggacatgttaataattacataatattcactgacgtaaaggcactacagtgttaatttcccgacattcaaggactttctgctccccctaccctgccctttcaactccatacgctgtgctgaagtaaccgtcctgatatagctttctttctatgatagtgctttcattcctgtagtctaataaacaggccctgattctcagccaagaaaccacagccctttgatttatggcaaataaacgcacagtggtgtcactttctggcagactaagccagggccctccccatgagataaaaggagagggatagcacagtcctttcagtctttgttgtatatattctaaaaatacacgagccaccattactgggttggtgcaagtcttggcaaatctgtgatggtcagtgtcaaagtggttatttttaaaagcatattgaaacttctgcagtttacaatcgtgttctttattttaatgaaagaaacagagccactaggaagttctagctaatggcttttgggcatcacaaagcagtagtgtattcagtctatgatgaaaagctgtgaaatgttaaactaagtcgccatttctaactggtttgattacttttttgttaagctagggtggaacatgctcacaagcacagaacagcagaaggctggttttggcttcctggcgggcccttccatggcctgtctgtagaagctgagtcctgccccctcaactagccgtgcagggtgggaggcagtgtgagttacaaatggaatcatcagcacaagttgttctatgtggtcatttggagagaacactgtaaagaaacatttccaaattgccctctcacataaatgtaactaaattacaggttgccagttcagttctcaatagaagagagaatgagcattttaatcaaattcagcgttctgtactacactcctaattttccacaaactgattagtgctattcactgtggctgtatgaaagtaacctgtatggccaggtgcagtggctcacactggtaatcccagcactttgggaggctgaagcgggtggatcaattgaagtcagcagttcgagaccagcctgaccaacgtggtgaaaccctgcctctactaaaaatacaaaaattagctgggcatggtggcgcttgcgtataatcccagctactcaggaggctaaggcaggagaatcacttgaacatgggaggcggaggttgcagtgagccaagattgtgccactgtactccagcctgggcgacagagcaatactctgtctcaaaaaggaaaaaacaaagtaacctggttgctagaattcatacagctttaggattcagttctgacatgatctatgacacatccatgtgctttcagttgatcagttgcctcccaagtgtcctttccagagattgagtaactgcaaaaatatccttaaggtttccagagctaaggtttccggagctgagttttccaggggcggggccagggggagtggggagttatgggagggaaggggcctgggagagggggaagtggatcaccagaacggctgaaggggagggctctgggcggagggagctgagaatgtaacacattccatttagtatttcattgattgtataaacaatagtaggtcaaaacttgatagcacatactttgccagagatactaattgaccaggaacttaggttacaacttagctcagcaggggagtccattgaagtgcccggatccacgtagctctttgtgttggcatcgctgctagaggaggaggggaggaaggagcttcactcaggctgcatgctaattcatcgatgtttaatattcatgaaaggattaagtcagtgttgatgtttcttctgctcctgctgagtctccacacctggatccagaatgctccatgatccgagtctttgtgtctttataaactatctttagggagctttaggactttatctcgggaaatattaaggaaatggttttccttaatatcagcagaaagttttcttacacataatctaaaatcagctgcttcatgatcttacccaggtgatctttctctgaattgtgcttttaagcctgggaggttaacatactgcttctctgtggatggggttttcaaattacccggcagcatccttgttggtgctttctctaatttgagatcctggagtccaccagggaactccaggtgaccaccttcaccaagacacattgctggtagtgcagggaaaaggtggcataagcacaggaagaagttaggttcagaggaaatttgtatcctcagcctaatagcaagaaaacgacaactgctaaaatatctggaagtaaaagaagcagcttccttttgtaacctcacgtgagaggttattcctaaggcatgggctcctcctatacctttagattcccctaggagccgtggtatagctgtggtcggcttctggtttctgagcttttccccacttagagctctttcacaggcacagatattacatgcatcgcctatgcattcaagccctcctgggacagccctgatctccagcatctgtcccagtgcctccatacatcatcaacacatccttgtttttcagtgtttctccatccacactgcatttcttagactgcttctcagggatcttcttgtgatcaaatgtggactgtctaaatacagtcactctatgcggggcaggtctctaaacccaaaaactgccaagctgtgttcaccttcaaagaaacacactcctatcagcagacttgggtgcacatagcctggggtgtgaggctgggtgctgggagacttcctgagctggggcacacagatgtcctgggtggtcctccagattatatgctactgtgtgaccatcagtatcctagagaaggggctctgtgttgggattttaaaattttgccccagaagctacagtgttagggtcctaagctgatggaggaatgtaggcctaagctagaagagcaccccatgggagctacatcgaggagaaactcagagcatccctctcatacacagtgacactggacagtttgaaatacctttaagctctacctggtttggcagtggaatttagtagctagaacagatgataatgtttttccctttccctgtgatcaccttggcagcaaccctttacgtttgagactacggggtcttagaaccaagttctgtaagaatttggactctgcaactgtatggggttcatttcacagtagatttgaagctgttggaaatctattgctgttttccagacacttgtaagtgttttctatataaatagatctaattaactttgtctagagaaaataattatctgggtgtaccttactttattaaactgatcagaaaacaaatgcaaggtattaaataataatgatttcttgcacaaacagccatcagtggcctatgtacataccacgccgggtctgccttcaggctgggaagaaagaaaagatgctaaggggcgcacatactatgtcaatcataacaatcgaaccacaacttggactcgacctatcatgcaggtacgaagattgccatccaacttaaaaccgcaggccatagaagccgaaatgtacatgaccgaactcctttcctggtgtttatgtattgttctgaaagacccgtatttgtaaaagctttctcacaaagaaaatgcattactttaaatacaataatagcctaaggaagaatttgcttttcaaatcagtttatcactgaatatattttaaaaatgtgacgtgaaagatattttcaaagtaagagcctattgcagtgtgtagcttcttccctgcccagcccccactttaatccgaggctagtttttatgctgggctagtgattcatttttatttcccttgaatgtgtttccccatcctttcccccatcattatgtttaattatttcctccacgctttaaataggccagacctcttattattgctgtttgcgttgttgtttgggttcgcgctcctaatcacacacaccgggagatcctcctatgaagctaacttgtttttgcctccaaaatagcttgcagaagatggtgcgtccggatcagccacaaacagtaacaaccatctaatcgagcctcagatccgccggcctcgtagcctcagctcgccaacagtaactttatctgccccgctggaggtgagacggctacctcatctaactggactcactctgtcctgtgactcccattctttcttctctcttaactctgccttcagtttcgcagccacctcctctctctgatcagtcgttgtgttggtagtgaagggtgttcttgtgcagcctttctacctgcttctctgtctcgcccagttaacattcctggactctctcacctgattctcattctcatttggctaaggccgtggtgacttgtgctggacgtgggcactctcttttcaggacttccaccgttcttgttgtgtttcgcttctttttgcctgttacctcattagaattgcgtaatccctctttcaaataccaagtgctgatattgagtttttaaacatagctattgctttgatcatttgtttttctttcgactgtagggtctttcattctatgggcatacatgtttctgatgcatatttgcatctctgcatcatggctgggcatctgcttgtgctctctgtcgtgtttgtgttgttttggtgccatcctttaacatcacaaatgtcagagttagagaagccaaagagcaaatgtttgaggtcctaagcttgactgtgtcttagagacagctgtgggcttctccacgccctgggtccagatgctgataagtgggaatggatgctgtctcttccacactctgatatgaatgtcatgggtaacaactgtgagattccagatcgttgtatttattgatgtagcttttttcctttttgtgctctaaaacttgccaatctgttcttcattagactgtgagctcattaagagcaagggcacatttttctccactctgtaaaatctccatccataatgcttagtacagaacagtatttttggtacatactgagtagctaccaaaggatggtggttataagtacttaatattgttgtgtgtttatccaacagagaaaatgtaaagttagattgatttaaaagtaaatgaatgacagaaaacaggttttggggatcttccctcttgtccatctccaaagagaagccttctgcaatacccaggtacattttggcacattggaatcgcacatgctaaagagttctaatcctcattgttattctttagggtgccaaggactcacccgtacgtcgggctgtgaaagacaccctttccaacccacagtccccacagccatcaccttacaactcccccaaaccacaacacaaagtcacacagagcttcttgccacccggctgggaaatgaggatagcgccaaacggccggcccttcttcattgatcataacacaaagactacaacctgggtaaggctgctgcttttatttggctccattttcatcatgaagtctggcattaattccttgatttccttagtgtttgtagttcttgcagaggaattggattgactgtaaagggtgtctccagagggtctcctcagcctgcatctggcccctgcataaatgggcgggtgggagtgggtgggcacaggctggtagctgtctttggtattggtgctgggactgccttttctcctgggaagctctagtttagacagttcaccgtgctggatggaaaggtattgctctgtgctgttaagattttgttaattgatcccgtctcacaaagtaatctcactaggagttataatcattttcaaataattttttcttttgtcagtttcttcttgcactttcattggcattacccaccttcttttgatttgtcgctttagtttttaccgttcacatcagatcagtattcacacatctgaggtacattttcatgcccttgatcatggggtaggggatgtactgagtgactttggttgtagatctgatagctcctttttgtgatcattttgtcaaaattgatttttcttaccatgcaactctttcatgtactcctgaattgtacccaagaaagaatctgtacattgtattatcttgagcaaaatgagattaatcaaaggcaaatatgcatatctttgtatttctgtgtcagttctttatttctttagccgaatcggtggctttttcagtgtagtatatgattcttttaaaagtcagttggtattttcctgctatataatctctatacctgtaattacactgaaaccggttcccgtatttctggctatttttgatgctgcagatggtttttcttccggttatgtccccatcgaattgtctagctagagttaactcagagtttaacttggtcctactattatctgtgctacttgctcaaaactgatgttatgggaatgctggttgagttttggtgattgttattggccctagctcttcggtcttggaccaacaataaacatacaccattaattcccatttctagtgatggacattaagtgtgtccatttgatagaccagcagccttatattcaagaacaagccctgctcaaggggatttgggctgtcattttatgccttgcccattgtgtggtatcagttcagtccagcaggtctagagggcgtgctcctagaatcctttgaaccgtgggacattgtgtcttcaagggcattcttggcatttggggcagggacatttgtgccttcagttgcagactatttaacaaacttggcttctgctaccaggtgctaatggtcaccattacccccaccccaacatagtgatgaccagaaatgccctacacatttcaaaacagccctaagtgagaaccactctaagagctctttctattttgaagtaagggaatggcctgccaagagaatttctcatttagatctggtaacattcatttggtaaactgataactgcttctaaggcatataataacatgtaggtttgactcccctactagtctgaagataatgttacagatttgcaagcaagccaagagtaagagacgggcagctcgttggaaaatatagtaatggagttctttttttttatgtctttttacttattaccatggaacccctggctgtcctgccagtgttctcatttactatagcactgctgtaatttcaagtccttagccagaaacaggctccagaaataagggctaacgaatataaaagtagatggattagtgtaaggagccactgtggcttgccaacataagctatgattttagtaattttaactagcttggtaatcaaatcccctaaccttttcacagcctttcaagccacaacaacagtgtaattgcagctgggcagattgtattttaaattaaacagcactcgctttatttattgcttgcaacattgctgaatgaaacccatttttactttccagttgcgcctgtttacccagatacttgttattgactaatttactgatttaaaatcataatctgttagaacaacgttttgttgctgctgctagtgtgggaaatcctcaaggtaacaactggaaattccacaagctactccccttcttaagcgaattcagatgtgctgacacagctgcgctatcgcttctaaacaaaggcctaggcaggattttccctgcggaagacacactctaaattgcctgttcattttgacaaaagatgaagagccggagggaagcatgaagataatttgcaacttaaaaatctgttttgagttggttttagggtttgctttgttttttatttttgaaagaagaagagaacaaatgagagaacagcatagctattcttagatttgagcattagaatagaaaaaggaaaaaaactggtaggacaggttgaaaatgatgaaaataacactccttcccccatcggcctgggcactgttgattcttacaccaaccagaagcctgaaaagtatcaggacatttcccctctatacattgagaaattaaaaaatttattgaaatatgtcatgaaagatgaccttttacacacacacagatactgaaggcagtatgccatcagtatttggataaagtttggcctcattctcttttttttaattattattttttttgtttttgagacggagtctcactcttgcccaggctggagtgtaatggcacaatctcagctcagtgcaacctctgtctcccgggttcatgcgattctcttgcctcagcctcctgagtagctgggattacaggcacatgccaccacaccagctaatttttgttgttttttgttttttgttttttttagcacagacagggtttcaccatgttggctaggctggtctcgaactcctgacctcaagtgatcctgccgcttcggcctcccaaagtgctgggattatgggcatgagacaccctgccaggccaagtttagcttcattcaaagaaagaaagaaagattggctttgttccccgcctgggtcaggcctttcagggaatgcatgctggagaccaggggcttgggagggatgtaccaaggagggatgttccatcctcagcagctcagagcacgtgtatacgggttgagtatccctagtttaaagattcaaaatccaaaatgatccaaagtctgaaaccttgtaagcactgacatgacactcaagcaataaatgcttattggagcatttcagattctcagattagggatgctgaagtggtaagtataactgcaaatattttgaaattcaaagcccctctggtccccaagcattatgggtgagggatgttcaacgcatattagtatatttgtgcctttcacaggatgaagcatgggcttgcttttgtagcaagaaagattacaccctagttaagttgcaggtttgttttccatccaagttcaaactaatgaaacttattactctaggtgtggttgctggtctcttccaggatggaaaagataaagaaaaaaggcacttttttttaatccctgtgttttatatattttgaattaggaaagccctttttaaaaagatactgctctttgcatcctgtttaaaaacactttgaacttgatggagggaagcaattttatattacacatgaaagagttcccgttatgaaactgaagaaaggaagaaacaaccaggcacactttatgcgttggatcatttattttcattgcatcagagccctcgttagtattccactttctcatcagctctgaagttgtccataactaatagagagccttgaccgccacttcatgtgccctggcaactaaggagagatgcctgcctccttgagtggctcggtgggagtcagggcttgagggtgaccactagccttagccctcagagctgattcatggcagctgctgccattatttttattatttttgataaaataatattataagcctcaaggcctctggccctcacagtctatgaagtctaggtttccatgcaaggccactttagcagatctttgaaattcggttgactttatacttcatgctctgcccctcactgcctccctgacacttttctctaatttcagcttcttttcacgctacggccccccccgccccccccccccctttaaatcaccagccttttaccaatagggctgattgtctttcacggtagcctacatgtgattccaaggtcaggctggccttgtgtgtagcattcagaagccctgccctctttcatgtaatagcagtcctcagctttctctaaatctggcatggtcataggctaggtggaagcccaagggtcccccgctggttgtggcgttacctggtccggatcagagttagcattgagtgggtagcttttgagaaattcagtgctttcagtttttcctctgtctgtagttaaccagtcatgaatgtttaccagattatcagcttcttggaccttctcaatcctaaatcagcttagcatatttctttatgttctgtgtatgtcagtgtactgcagaatactggattattttgtgcctctgcttagccttttaaaaaaatatattgggttcagggtcaatatgcatcacaaactgctaacaggatttctttcttcatttaaaagttcacctagctagcaagaagcaagggttgatttttgttgttcgtggtcttttttgattcttgccagttcccaagatctatgattatgattcagtgatactatgacttacacggttgacttgggaagcagaaaaatctagtaatttggcagcagcaaaggccctattataaaattgaatgaagctgatatcaaatgtcttcacagtttactttttttaatcttaagcttatttggttgatagtggttttttttttgagtataaagatatggattctcctttttatgtttttggaggcaagactcactgcatcacccaggctggagtacaatggcacaatcacagtttacggctcactgcagccttgacctcctaggctcaggtgatcctcccacctcagcctttcaggtagctaaggcaggcatgcaccaccacactcagctaactttttgtgttttttgcagagatatggttttgctttgttgcccaggatggtctcgaactcctgggctcaagcagtcctcccgccttggcctcccaaagtgctgagattacaagtgtgagccactgcatctggccttacactgcatttctttttcttttttttctttttttttttttttttttttttgagacggagtctcactctgttgcccagcctggagttcagtggcacaatctcggctcactgcaacctctactttccgggttcaagcaattctcctaactcagcctcccgagtagctgggactacaggcacacaccacacccgggaaatttttgtatttttagtaggaacggagtttcaccatgttggccaggctggtctcaaactcctgacctcctcagcctcccaaagtgctgggattacaggcatgagccatcgtgcccggcctacactgcattttaactgggtctacataagtgagagtcagctcctggactctgggtcataatctttgggcaacttcctgttctctctgaaactccatttcctcatctaaagaaacagaccatgtgcccaacctcctaccaagggtctgttgcaggattttacatctgaccatgcctcataaatcatgcagcctgacccaggttgtcagagtacatatttctcttttgttgattctctgtggtatcttatgaagcttatgctttaagaaaaaaattttgtaaacgtttaaatattaagacataaatgagaacttaatctgcagaacttggtcaagaatctcagtaaagttgtatcataactttgtgagtttgcctgatgaaagcgactctccctggagtagccacgtgacttcacagaccagattgacattctctgctgagttcagaaggagtggaggggagcacaagtgctggaggagggtgtggcagggaggcctattccctaacgtgttaggctggctcccctcaccgggagctcgggacccatggagagatttcgaaaccgttgtccccactccctctttgtgccacattcactggcaccctccattctggtttccctagtaacatcactgctgggactctcttccccttccccttctcaaggtctcagggaaatggttaacctttcatgtaaatattcttactctcctctctccaccaagcacaagaaggaagagtacagtctgtctcgagagacagtcagccaggcttcctgtacaaaacagagatgggacccatctcacgctccaggcatggacagcctggttgccttgaaacaaacagctcaagaagaaaagcacccagtaactgcacacagatacttccacttagcatctactgtcttttacatttttcttgcaggaagatccacgtttgaaatttccagtacatatgcggtcaaagacatctttaaaccccaatgaccttggcccccttcctgtgagtacactggagacacatggaatggtctgaatatgtgtgttcctttatccgctcaatgttgatggagaggccctgtggaccttctctatctccaggctttgtggatctcattggtttgtgtttcttaacagaattgggtgtttagctgaattgtagtcatacattatagttcatgtgatatccagtacttatgaaagaggtttctgaattgctagcttctagcagaagatagaccttgtacacaggatgttcaagagacgttctctgcaggtgacaatttaagtggcactcattcattttgtaacttagcaaccactgagtttcagtcatattgctgattaagtcatcagaacaaaaataatgaaaatagtatgggagaagaaggcctaattaatcatagaaagtttctataagtcatttaacctgcagatttttaaagtttttttctcccttgttggtgacggctcagtaggagttgagctatatacttaaaattggattttgaatgaaaccttcacatacatcctcctcaacaactcactctcagtttgaaaaagccgtagggggtgacagggcagtggttggactccaaggctatttttaaatgggaatttttgttgttgttttccaagtgtaagaacctttttgttgcctggtatattagggcaacattggaggctgcgaaggttaaggttcaatcattattcattaggttatacaggtatcccacaccaaatctgtttggttcctgggttcaaatagaaagaaccagagagttagtttagaaaacaaaagaaagcatttttttctgaatctgttggattcctgaggttcagatagcaaatatggatagttcagataatgagggcataccagctttatcttgaaaaaattctccaaatctgtttagttcctgagcttgactagcaaaagttcatggtggataataccaatattagatcatcaactgcctggacaacacaaatacagttaaccatgtctaacatttttatattaaccccctcttcctttcctttagtactcagtatttatttaattaaatggtactcaacttcaaactccactgttccatggaatgctgcggtttccctttgaagcttttgagctagcagcccatttccggttcttcatacagtcagcgcatctgagacctgagcatgtgataaagcgtgttgctagacatggtcaagagttaacttgaaatgttcatatttagttcacgctcaatgcataaatgtaccctagcagaaaagagtacagaggtgttctatagtttttaaatgttgcctttgatttcagaactcctagctaatgtttatattttctctctcccttccttccccggatactagcctggctgggaagaaagaattcacttggatggccgaacgttttatattgatcatagtaagtaggcgctgttatggacacacaggtgttgtgggttagagggaaggagtaattcaaacatcatagtgaaagctttgtcattttactctttatctaggcagccaggtgttatgtggagaaaatgataccagagaatcagtgccttcatacggtactgtgcattcaccccaagtttgcttaaagtagcccatcaaactttcacccaatctgatcttgtgacctattaacgtgtttttttttgttgttgaatttttaaaccacattttgattgttgatcccttgacttttgcacatttaataaatacactctggtaatagaaaataagattagaaatgatgatttagtcaaaaatctgtgaacagtgcttgaagcagcatgtaagttttttagacactgccttcaagggtcctatggcaggatgcccgctctgaccttattttctattcacggcatgtttccttgcacccacaacactaatatatatgtattttctggaaattgtagtatatttgctatagacatttgctccagcacctatgaaaaaatgtgtggtttctcattccaactaaaagttcaactaataaaagtttgctttttagccagtgggattttttttttctcattctttttggaggtgccatgttcttcatggaatcatatttctatgtcccttaaattttctgaaaaagtatattaaaaagaagccttcaaatagatgtaaagtttcaaccatgagtgcaatttggtagtatcttggtctttgctttcatttggttcatgaacagaaagttagggtttccctggcttcacaatttcataactaaacaaaagcacgttgatgagccacctgctgagaagtctggccacaagtaatcctcacacgtataggactggtcactatctcataggcatagtacgtttttcagatgttactaggaggcagagacattgtgaacagaatttcactttcaggccctgggggttgagggcttattataaatggaattaagcaaaagtaccagcagtttacaattcaactgaaagtagaagtcctaggtgtatttagaagagtgagctaccctttgtttaaaccagatatttcaaggtgcagagacttagtttttgtcttttatcaaaaaatgggcagatttgtcaactgtccagaatttcatagtaagcataaagtatttttcctgctttcatgtatgtgtatgccctacttttttccttaatatactatttatttattgttttaagagaatttactaaaatgagagagaggccacacctctttttcccatgaaaaacaaaataatagtttccggcttggtgcagtggctcacacctgtaatcccagcactttgggaggccgaggtgggaggatcagttgaggtcaggagttcgagattagcctggccaacgtgatgaaaccccgtctctactaaaaatacaagtaaaaactagctgggtgtggtggcgtgcacctgcaatcccagctacccggatggctgaggcaggagaatctcttgaacctgggaggtggaggttgcggtgagacaagatcataccactgcactccagcctgggcaacagagggaggctgtctcaaaaaaaaagaaaaaagtttcctttatagtattttttatacatcacaatcacagttttaagacaggtgtgaataatactgatcattttactaaaacaggtctttactggtaacacatcctggtctgtgacgcatggagagcattgcacacaatattgtgacagttttctggctggagatgtgatgcttaggtccccctaaaaagaatgttgtgaatgtgtttcgtataccgcaaggagccaaaaacagaaaaacacaattacaaagggctgtcgtagcatgcgttaaaatagtgaaaatcactgactatttcacttgtggtgtcatagacctagtatgatacatagcagatgcttgatacttggtgacttgaaatcaggttcatggaggatcagtggtgaagctcttaggaagttgttgtgcttgatcagaaagtgaagtgaactcacttgaggagcagtaggtgcccccactccggctttccacccccaccggcctgaggctagcgcaactccggcttactggaaggtggaagaaggtaactacctgctagatgcctgggcttttccttactcctgatcagttctgcagttactccagcactctgcccaaacatttcctcatttcacttgactagagcagcacccccgaggctccattatactctgtacagagcttgatgcaactaagctgtgccaatatatttgtggccattgacttggagattaaaatttattttgcccttgcacaaccatattgaaagattctgttaaagagatatagcataaattaagtgaccaaaaaccatttaagaaaaggatttgtttacgagtgcctccttagctgttcatgctacgtttctaccatcgctccataattcatcaaggtttactcaatggaaagctgtagagcagtacacgtcagtgaaacagttcaagtcatttgcctttccacaaaattcagtctgtgaaaactgcagaatacctatcttttgaagaggctttatcaggctgacacatacattccaaatgggttgaattacctggaagataacatttaggaatgtcctttctgtcagaagaaagcctctttttctaaacaatcttatagcaaaactcagcatctgattttgctgtcataatgcctacaggacaggaaccaggttatgcccacgtatgccacaatgccgtgagtgccgtcatcttgtaaattgcttagagtcatcttgtcttccagcatacctggcacgtgggtccacctggaattacagatgagatgatgagatgcacttgtcttttcaataattaattatttctgctttgtaagtttttcctgagaagttagacattttcaagatgaacaatactcagccatcataaagatttaatttcaagagcaacgaatgatcgagactaacctctttagactcctcgattcctttgtttgctgtctatggaatggctcctggctcttgggcctcaggtgggaggttaaaggaaggtcttaaactgaatctctacatcttgtaggaatgatgtcattcttcttaaagaccagacaggcccagcagctgagtaattggccacaggtatcctatctacaacattagaagagaaaattgaattccagtgattttgtaaagtcctattttagtctttcctgtcaacagtcttactagacctgttcatcgtgactaaactgagtttctcatccttccacttccttcttgtccttttattggaaatatatctcaaagaggaaaagcaagtttaaaagccaaagttctttaaaaaaaaaaaaaaaggataactggctaccccatactttcatacattgaccatacttcactgaagaattctttatcataaccatgtagaaacttgtgttgttccaaaagcttaggctctttttaaagggactttgttttcaccatcagcttcattcagtcattaaaaaaataatgcactaagttcctgttacctgctgggactggtcttaagtggtagagaggggattgcaaagatgaataacacacagtccctgtccttggggaggttaggtccagtgggaagtagcaggggatatttcaggtgttagaggagtgaatcagttgttacacagaaacagaagaggcaaggactgcatctgcttgggaggtggttgggcacagggatggggccctgagagaatgggtcactttttagatggatgacaaacactgagtaggattgaggcagtcaaagccccaggaagagtgatcctaggatgcgtggaggtgtgtgaatatgtgcagatgctgccacgttccgagaaacgcagcattgctccaaacagctagtgtgccgcaggggcgcacaggccaagccaaagggtatctgcccggtgtggggactcgggctcaagccacaggcagtggggagctcccaggggatttcccagaggggagggatggggtcgaaatcgttatttagagagatccttttggcagagctgtagaagatgtcttgaactggggttggggggtgagacaattcccagtgacgcccagagaacagttcagggaaaaaaaatgagccctctagcaagaagcttatcaggaatagagagggttggtccgggaccaccagagtgagtgacacggccaggttcctgattgggacagtgagtggattgtgatactgcacattggaatgtaaggtcacgttaccaattttggtgttgggtgatcagaggtttggttttggtagagttaagctgaagtacttacgggaaacccagatgcagatgtccaggatggagcttgaagttcaggtctggtctgaggacttgcgaatcccaatgagtcaggagttattcatttattttctgctttgatgacaatatccattgatacggttataatccaagttggtgttttaaggcgcaatttttactcagctgtactccgtttcctttatttggttttcttttctcttgttttccatcacaatagcaacttttactttccaaagtcttctgtgaaaggtaagggacccaaaaatgccttttgcttccatcaagattctctcaaacagttgagatttttcatgtaaattttctgccagcatgaaaacaaaagattctagaatcatcacttgctttggtagcttttttttttttttttagcttttcctctgcttctattaaaataataataagactttttaaaattcctaatatggtcattaaaacagaattcactaattattcttatcagctcacttacagtgtatacagaaaataaacagaatcaatattcttcccctgcactcccccgccccggtccccaagacaggtgcagatcgggctggagcatagtggcacagtcatagctcactgcagccttcccctgggctcaagcgatcttcccacctcagcctcccaagtagctaggactacaggcgtacaccaccacacctggctaatttttttttttaaccttttgtagagatgggtcctcactatgtttcccaggttgggcccgaactcctggcttcaagtgatcctcctgcctcagccccccaaagtattgggattacaggcatgagccactgctcctggccaccctttacttttcaaataattttcttcttctttttttttttttttgttttttactaacctagatatccaaaaactctggagaacctactctccctagtgtgccccaccccccgtacctttcatgtgagtccattgcactctctctccctccactccaccctagtacacacacaggaatccgtaaggtctttttaattatgcacagttacaaacaccaagtgatctaaggcagctgttgtgtattatcacctacacaagtaatggtatagatagcattgaacagtcttgtgcacattaactcacttggaagaaagcaaaccaccttttgccagtgtgaccaaacagaaaccatgctctgtaatcttcctctgctgtatctaattctcttttttggactgcctaagctgctttgatttttgtgtgcatatgagtgacgcatgtaatagattattcatttgttcaatgcaggattcttaattgaaagcagtttttcaacaccataagtaaagagaaaagtatttgaaatgagaaaaaaaatcgtgtgtgtgtttgttagccttttgggaaactaagactttttaaatgctttttttcaactaaatgaaaatcaagatcaagttataaatccttaaaagaacaggggtttataattcccattttagcaagttatttgcccaaaacagtatgaatagatggtttatctttagttgtgcatttttgattgagtgtttttaactaaacagtatgtgaggggggttgccatatagactgtagttacctgctaactctgaaatactaatttgtctttagaacacagggtgggggactggacagcttttgaagaatccagaaatacttccttccaaaactttctttacatagaatagatttgaactaatgttctgattttttttttttttttttaacattttcagatagcaaaattactcagtgggaagacccaagactgcagaacccagctattactggtccggtcagtattttcaaattctgcctcttcagtataagattttggttacgtgtttacgtgtttcttgtgtattactgataacggtgatgtcaagggacaacggtgattgagtagttgactagaaacagagcactttgctgccatctccttactgaagtttccaggtgaggtacagctgcatgtgccttttcagatggatttcattataaaggaaaacagcttgataacgacagcagaattaaacatttttcttctcctttataaaagggtggactataagtatagtcaaaattccctcccttcctttttatatgaagcaaaaccaagccctatcttcataaagtgttatcatttctttaggccaggagtagtaaatgtatgccaaaagtttaaatcttttacaactttcaaaaatctgtagaagtttgggtgagattatagctaagttcaggagctggcagagttaagagtttggaactctgccgacccacagtgttctcatggtcccctcatatatgccgggtggaaaaagaatcaattctgatgcaggcgtgatgacctcttaaaacaccgtagcacactgtgttcataaggcagtgtgagaaccccactccctgaagcatcaggagacatttggtatctcacacttgttaacaagtctgtagaatgggaccacactcatcagcagagagcacaccaccagcttttgtcagtggctatacgagtgcagggaggtaatttggaattacaggagttgtactgcgatcagcagaagattgcaaatttgggattcttagaccagaggagcaaaaggaactgaagtttgttatatcacatgctgagctaagaggccagtaggtagatttaaaattccaatttcatggctttaatctgattccattcaaattatgttttgaattagtaagatacatccatttgaaaacttaaaagatactacattgcaaatgtgccccggtaactgactcctgttagttacttgttggatttgtttagtcatttgggtactatttcctaggcaaagtgcccagtagtacctgggtaaaaacagtcaacttttttctctatgcggcttaaacactgccttactctgatgcttccttttgatatatatatattcgcagtcacagttgtttattggaatattattttctcttctacatcattagaacaaggtaaattcaagaaactattctttttaagtgacagaagacttttgacataactttgaagccttttcaaaatatttttatcacttatcaattaccggccgtcactcaaacactgctagtccttattaaatcttactgaaaattgctcagcatcataaagccaagtagatttgcccccaagaaagagctctctgctttctgttaataaaagacccttgtttattccttcatttttattattattattcattatattgctttcaatagaggagaatctgtatttaggtagttatcaacttagtgtagacatttggcctttgttgtcattcagttctaaatatttggcaattttcatttgatttttcttcttgacttatacattatttaaaatatgctttttagtttctaagagtatgggagggttgtgcctattcatttttttttattgatttctaattttattgcattatggtcagataatattgtctagagaatatttattattggatgtttatttaaaacttcattggaagcttgatcactttttgtaaatgttctttttctttttaaaaagaatgtgtattgtgtctttggttgaatatagagttctttttgtgtccattaggtcaagcctgtggtgttcaaattatctacattctcattgctattttgctattggatctaatcaagatagttctgtcagtctctgtggtgactgttgccctgtcgatgttgtctgaggtgtatataactacattctctttctctgttcgtatttgctgtttagcatatcttttctctctcgcgatattttatcttctttcttgccttttgttcaattgatagagtactctctattttattttctctatgtgcttgcaggctgtactttctatttgtattcttatagctctcacattaaactgtgtaacccacatacttgacttagggttaaaatgaatcactgtctactctccttaacatcaggacctcagggaacttgaatgccattcttcccactcccatttgccacgtcattgttgggtggaattttaaaactaccttgctttaaactttcctaatagtcaaatagtcattaatatgttttatcttttttctccctactgtccatactgatttaattttaccaaatgtagacaaatttctttgcccaccattggtttgcccaccattggttcttccatccattttttttctggggtgagttttgatcttagtgaagcctagtccagtttatggttcttactgtgtggtctgctgaccagagtatcagtatcgcctgagagcttgttggaaatgcaagttttcaggtcctaccccagacctactgaatcagcacctctgggggtgggacaccagtctttgttttaactgctctcccagggattccagtgccccctcaggtttgagcacttctgcccagcagcactgccagtgacagtctgagagtggtaatatctcttagtctttgactcaaaaggtctcatttgacctctctgaagttcagctgatgatagaaatcttggttaaattattttccctcagtgctttggagattctcctgcatgtcttctggcctccataaatgatgataacaggtttgctgtcaatctcattgtcgtttctgtgtaggtaaatggctctgttctctagtgattttgaatttttatttgtgtcttagatgttttacaatttcgctatcatcatgtacctatgtgtggagttctcttcatttatcttgctttggactcaggcttcttcagtatggggattgtgtctttcctctgttctggaaaattctcagctattatttcttaacatactgcatttttccgattctctctaagtatctgtttctgtaactcctattggacatttacttctctttcacattgtctgctttatctcttaacttttgtgttttctgtctctcactgctgtattgtgagttattacttagctcttccagttaattctttaagctttttttgtaatctctttatcagttcattgtgtttattatttcagtgactaaatttaattgctcaaagttttatttggtcgtttaaaatttgcttttgtcttcatagttattttgtcctgttctctttatctctttatttatttttgatgctttcatctgcttattatttttaagatatttatttcttagcctctttgagattattctattatctctggtcctaggatcattaaatctcccactacgtctgtagactctccttaagagtgtagattattgcctagttcagtttataatttgtgtgtgtgtgtgtgtgtgtgtgtgtgtgtacatgcatgcaagagggagagagagagcatgagcaagctcatttttttttcctatgaggcttttgtaagtcctgacctgtatttactgttaacttcttagcttgggttcatgcacccccagtcagtataactgtggacctcatacccactttggcacaggcttggagtatggatttattacaggtctgtttctttttgtttttctcccatttatggtcctggacagaaggtaagcttccttgcaacttccctggtccggtgggtagagttttcttgtcccctttccagatgttaggttttaaacaatgactgttctttctccatcatgtagaccaaaggccaagttctgtgtccccatgggagattaaaacccaagcccctatgtctaggtccagtgcccactgatttctctaattgtgagtctttctgcttacctagtacctagagtttctcttcccaagttttaaaaatatcagttctaagtaggcctagcgtttctacatatttttagggagaggggaccctttctgtggcagctcagtgttcagcattcctgtaagttagcatgctctgtgtatagcagatatcactagtaatagcatttagtaagtgatgttcacacatgctgctgtcatgaacactatctcatgttgtgtaacactttcatttttccaagaactttataatcagccgacttgaaactcacagtcgtcccctcagaaaggcagggcaaatgttgttatttccaatttgtcagaagctcagaaagcttattctgttgctgacagtccttgcaagggtcagaatcaggaccggagccccagatgcgctggtgtcactgatgtccccgtgccgggcatgagcccttctgtgcaaggagctccaatgtctcccggccagtgatgatgtgaaaacatttagaaccgacctacacaataaggcagattttcattctgtacccaaaacaggaacacagatttaatgcagagcaaaagggctttaatcaacagatatgttcatttttcacgtagacctattttacaagctaacttgtaagccagaaaatgacattcgagattttcaagtgagaacaaatgatttggtccaataattaaaaaaaaaaaaatgtacgtgtaatctcttcagaagctgcactggaaggatgtttgtcctggtacgttgttggaaagttttcaggaagagaatgtaaaaacttgctcttcttattctatcatgagaactacctctggagagaaaagataatgaatgcaagaggaagacagtgatttttcagctttcacgcatcattccccagaaggagaaaggcttgaaatatctcaacatttccgcccacacctcctcagcccctgccaggagacagagcaggcaagggaacgggcatcataggctgggggccacatgttgaaatctgctccttggggaatttgtcatttaagacagtcgaacttgcatacacagtgatgactgtttaagctttttttccaacattttcaggagtagggggaactgtgatgtaacagtgatgtttggagaaccctcacgaatacaggaacaaacaaaaaatagttgctgggaatcacagactttcagaaatagaagagctgagtcacgtttgttcatccagtcaaattcttccacttaacagtgaagaaactccttagtagagaggatgtgatgcagagccagctgatgagagtctacccgagagtgcaggccttctaacgctggcaggagagagtggaaggaagtcacttttttagttcctatggggtcatttttttcctcatggcactaccacggtttattcattgatttcctattgcctgttgctctcaacagcttgtgagctccaggagggaactgggaaagctacctttggtttatgtactgttatttttctggcacctaaaatgccttgcacagagtaggtgctcaagaagtatcggttgaatggacgagaatgaacaccagaaagtgagaaataaactagagaggaaatcttagtttgtgacgggatgtactgttggtagagcagaaaacatgatctctttattggcttatgtcagaacattgtattctttttcttattttggtggttgtccaggtattaacaaatttataccttgcctagactcagaattgctatgtggtttcatcagactaaacactgcctaaaataaataggatgtgaggtcaaatctgttgttcagtggaaaatcaaagaagactggcttaaaaactaagaaaagaccataggcagtgtaaattgtctatagattgctcctaagctatataaagatgatgtattttttgctctggaattacagagcaaaacactgacgtgctcattttctggaagagtggttgtttgttttgtttcgggttttttatataaacatgtcttaaaactataaaagagggaagttcatgttcttcatttcttctgtttctggtcaagataagtatggtgaaagtgtaaggtttggagtctggagatactagactaaggatcagtatattttattaacttaggccgaaatgataacagcagaagtattctctgctgaaattcatactagtggctaaaaagcaatgagttgttttcgaggctgtcatagttaatgtctgtgtatatgcaaaacccaatcctttttgctcataaaaatatcgtaagctttttcagtagccaaaactcacggccctgactctaagatattgtaagctactttacaaggtagcaaataaagattatttaaatgactacattaacatgttactcctttgcctgaagagatatcacaacttttgaatgactatagttaactcaattcctgagccctcaactggggtactatcactctatttcatagataaagcatttgagatttaaagaaatccttgcccaagaccactaaatattaagggacaaaccttctgacttctaaattgaggattttttgagaatgccatctgcctgattttatattccttgataggagtgtcagttcacttccctttctgctcgttgtatttccccacaaaaattcgttaaaccgtaattagacttttcaaaatgccaacgtaggtcattctgggttgtatgttagaagtatttagccaataactcttacctaaaccacagcaaaaaagaaaaacagaaacaccctgactcatattctgacaaaagtcacttggaaagcatgtttagtttgtgtagcgtaccccaaatggtttctcaaatagcagtatagctgttttcaggggtgaaagctgcattcaaagctgattagccctcatcagttctaggactttcccctgtgctgtgtagacattatctaatttttccatggataatctgagaagtgagaatttacggtttatgactcatgaaattctcttgaatgttgcctcagtatacataaaatttcaggtgtattgtttgcattatctatatttataaatttatcttccaggctgtcccttactccagagaatttaagcagaaatatgactacttcaggaagaaattaaagaaacctgtgagtaatcatgccttccaaaaatgctttgtgttagtcatttgtaagttaccacagtcacttcagtgagaacaacttggttgttacttttatatgaatgctaaaaatattaccttccttttctctctgcactttgatcctcctggttctaaaatctgaattttctttttaacagaaatggtaagtgaaaattaactcagtgttacatatcaaatcacctgaagggtaatttcctatgtaatacataaaaagacaggaatgatttttatgggatataaaataattcagaaccctagtcacaaaatctgtggaagcctattcaattatgcgcagttatcatatttaattaacctggatcccggtaagaaaaatgttcaagtccttccttgtaaatgcaaaagcttagtttcaactacagtatttataatatagtgttatatttaattataataattggcagtattacgtccaaatgtaattttctacttataattatccctggcagtttaaaacctagaaactctaaaaatttttatgggcaacattttaaattataacattgcattttctaatgacacaccatccccaaattgttcaacattgcatcctctgttttactttccgattcctccttagcagttttctcttcaattttctccatcactatggttacacctctagggaggggagagaagcggctgcagctcagaccccctctggtggcctgggctccattgccatctctccctgcctcctcccctcagctggttcctcctgcccgggaacatctctggatggggcacaatgtctgctctcatttaggggttttggtctctgttccaaagtcctgattcaagagcttgcgggtaactgctattgaaatgattctttgccttcaaaactcaaatgatcactgaaaattccacagttttctttgtgagtcatgtcccctggtaatgatgatgactgtggtcatcacccagtctcactctatggctctcacatagcagtgtctgctacccggaaaccatctctgcacattcattcttacagccagaccaagcctggaccgcctctttgcaggaggcagttgccacaaccttggtcaagtgttttgttattttcatgtcagcgaaccatgctttgggctgctttccccacacttggcataatcaggatcccactccccatggcaacaaaatggacttgaggcagcgtggattatatctaccacctggcggccctgccacagttgagcatggataggcccaacctggccaggtggggattattacaggttttgactacctgggctaaagtctcttgagtgaagcaacagatacagtcgactgcctttcggttgccctatgctggagaagtgcccacagttgtttattaaagggggcaaggaggatgttctccttcgcagcagagttctaactttcctgagcatcgctagtggatgccgtgtgtcccatcgtgacacagcaaggctttctgtctgcaagggaaaacccctaaaggagagaatctcagttggaaccatttgtcactgcctgtttctttgaggactgccaacttttctaccatttgctgttgtttttattagaaaacaaagtgtgtatttactgtatgattatgtgttttcttttgtcttttgtgtaggctgatatccccaataggtttgaaatgaaacttcacagaaataacatatttgaagagtcctatcggagaattatgtccgtgaaaagaccagatgtcctaaaagctagactgtggattgagtttgaatcagagaaaggtcttgactatgggggtgtggccagagaatggttcttcttactgtccaaagagatgttcaacccctactacggcctctttgagtactctgccacgtaagtatatggccacacccagtgtgtgtcccccactgagacagttgtatgaatttaaacagaatgaaaggataagcagctcatgagttcgagatgcattaactctgctgagtttgttctctcctcaccccacagccccttgcaagtctagaacaggttctgactctacgtggtgaaatagtgtactctgcgaacatctaacattgattttttttcttgtctattgggttcatggagttgaaattgaaaacgtggataattatgataaggaacaggaggcgattttcatttgcagtgttcaagaggaggacttgtcagtgttagaattcaaaaacaaaggaggtgttttttgaacaagagtcgtttctgaggtctcctgtgtaaaggcaaattgtaaggactttgaggacctaggaccatgccctgctcctgtaaggaaagaaccaggtttccccttgcattaggatttcatcattgccaggcttggaaactgaggcagactaaattgctttctgagcaattaaacatcagctacttccaggccagccattcctccttcagactctgaatcctccaagggttgggcagtacccaagcccccagtagaatagtcattgaccttgctgaagggcatttgtcatcactccagccctgggctctaaggggacgtgggttcccccacatctcccacctggtaccagtctcctgggggctcatttggaaggccgcctcagtacattcttcctggttgctctagccaagaattgcccaattgatttgttgttactgagtcccatgagaaagcccactatgtacaatgtatccaactattgaaggtggagggcagggtggagagagacaagatctttacctcttctccacattttcaaagatacccccaccccggaggaatcagtctgtgatcccagtttgaaaactactgatccacatgattgtgaaccaagcaagatcatttggacaaatctaaaaatttgcaggtttgcatcattgagagagccatatcctgttcctaatcccctcgaggccttttcagagcagagtagtggtcagaagacagaccaagggttgggcccatagcaaacatcttatggccaagccaaaagcctctggaaggaattaaacttccttcatcacagagacgacctaaagtactcacatctttgggaatccctgcacagcccctttattatgtggcgtttctcatctccccaagatatttggctgaaccatatgaaatagacacttcgtaggtcaaaaacagtcaaacatcagcgtctcttatggtttaattgactttagagggcacatgcgtcagcctccatggtgggtcacggttgagcatgtggtaagtcaggtcctctagcccacacattttcccactaggtacagaatgctcgcagggacactgtaaaagttgagtgacaggtggcaaacaaatatgcaaaatcttgcatttgaaagtgtgattgggcttttcttctctttctcctcaaaagggacaactacacccttcagatcaaccctaattcaggcctctgtaatgaggatcatttgtcctacttcacttttattggaagagttgctggtctggccgtatttcatgggaagctcttagatggtaagtcttgaagtaataaaaataggtcagtgctgcttgcggtttgctagtaggtgtcttatctttcgcatcatgggtttttaagcaaaagcttcactggtttactcataaagtatttttatgttttgcccataatggatgtccttttctctggtagcttattttgggcactgaagacatagtgtctacacacagttaaaaacaaaagtttttttttaacttcagtgtaaaacacagaacattatgtatttatacatttgtatgttttctggaataactttagtgaaagcaagatttgataacagatggaaaaactaattgaaaagttaattaaaatgatctcatctatctaatatcctgtgattattgcgtttgtccccaaattattttttaatttgaagggactaaataatttcaaaataatgttactgcttagctaagacattaaccctgaaacaaataacacaaaataatttcattcttatttaaagcatatagatcatggaagaatttcaaggtaccttgaaagttagaagtcaaaccctctacctggcggtatctataggcttagagacttctaaaagatttggccaattcaaaatagtgtccttaagaaaacactacagaaatcatcagtgagaaaaaagcatcagaaatactttttaagagcctggaggtagagtggttgaggatgggaagagggagagtaggatttgagattgacattgcagtaacttataagaaagatatttccaagggaactgtgttcattgcatttatagagccttagctattctaataaataatttgtataccctctgtacttttcccatgaatatgtttttactgttaattggtagctgatattgatgctctgattttgttgctttatttggtagcagggcgacagtaaacactttttttcctctagaaggaaactaaaccacacactctttccatgtatgtatagtgtgaatatattttaatttccagctttggagtcatgccatagattgtttcagcctgctccaattcactccaactttctcagaaggtcagtttagtcaccgtatgcaagtgagaagatgctgttagttgctacagtgtctttaataccctctctaacagggggtaatagagaagcataagatatgatcctgaccttagtcagcttatattttagcggggggaaaagagatgagaacaaaaccagaagaatcacagtgatagtgtctgagcagaagggagtgcattgagtcctcagaggagaaagtgacttggctggaggctcagggaatctttcccaggatgagctgcacctcggaggtggggtagcatttgagcgttcaaaggctggggtcatttcagatgagtgaggaccagcccagagtcaaggccttgtggaagaagatgggcggaagcaggaaccactcagggtctcaaggagctggctaaagtgaccccgacaagagtgatcacgatataaacctggaattgcacatttaagagtccaagtgcacatagatgggcctagtcagcagtgtcttcaaatttcccacagatgggaatgtccctgtcggcagggctcattctgcacatctgtccgatgggaatgtccctgtcggcagggctcattctgcacatctgtccgctgctccccctggtcggcttcatgcttttacttccccagacactggagtctattggagcctgcatagggccacgctgagccggggagaattggcctgtactgcagagggtgggtgcctggtggggggatgaaggagcagaagcaggagcctggggtgccaggtctggtggggtcaggaccccctgtgaggaggtgcgtgatgcctttggatcaggtgaaatggaggcacctgcaggacgcctgaatggtgggaggccgacctcgctgctgttgcctccctgaggcctctgccgtccctccgcggggggttgcacaggccctctccggggccttccccatttccagcctgtccccttcctgtgctttctccccatcgctgcccaagcaatgataacagaagacagatggaatttcacctggcctttcactgactccccactgccctcagagagcaccccaactctccagcaccccatgtgggctctgcactgccggccccttctctggcctgtctacccgccctggcaaacggctggcaagtccccagccttgttcctctgcttagtgtgcccttttctcccccaattcctacgcctgatttgcactgcggactctgcttgaccttgaagctcatctgtcacctcccagaggcctttctggccccactctgctgcgccatctctcttagcacagctgccctcctcatgccactctccccctgatctcgcctcctcgcttgtgcaatactgtagaaggcccttggttactccttcatggtttctcatttacattgaaagcaggttaatcttttctttcatgctctgatacatagcagtgtcaaagacctgaaactaaacccagtgtttaccgtgttttaggtttcttcattagaccattttacaagatgatgttgggaaagcagataaccctgaatgacatggaatctgtggtaagtaaatgcacgtcacacactggccatcaccgggcactcgtgtcttatgagaaggtattggagagccatatttgtagtctcagccacttttatgggtgttgcattccatgtgaacaacaggagacatttaattgcttgaaaagttcattgatctaattcttgtaataaatcattgttcacatttcctggaaccatggtacctagggtggatacatccaaatcccagttgcctctgcttacccggcataggacttgtgtgaacttactaaatccaagagacagctgaagatctatggtagcctgtgttttctataaaaactgctgctgctgaatgtttagagcttcatccgctctccctctgtttcctgacatcataaaaatggcagaggcaaaggtcaaaacaataggaagagtatcaggcagacgtcctagacatggatgagtgacgccacagctcaggcaagtgaacacttgagacgttctccaagtagtgatttgggttttcatgttgcatttaacattaattttacctagacagaccattttagagttggaaggattttattttttttttattttttttattttttgagatgatgtcttgctctttcacccaggctagagtgcagtggcgcgatcttggctcacttccgccttgcggattctagcaattcccctgcctcagcctctcagatagctgggattacaggcacacgccaccatgcctggctaattttttttttttttttttttttttgtattttagtagaaacgaggtttcgctatgttggccaggatggtctcgatctcctgacctcatgatcctcttgcctcatcctcccaaagtgctgggattacaggtgtgagccaccgcacccagcacggatttgctataaaacaaaaattgatgttctttttataatatacttctgcttctgtttttcttttaatgtacctataccccacatctacctccagagtgtatgggtgtttgcccacacgccagcacacacacagggccactgggaagcgcgtttgtccatttggggtatttgcagctcattcgtgtttgctcacttgagttaaaaagcccctgcatgatgtcacctgcctgtgataccaactgtattttgggcacggttgggtagatgagctgtgtcctcggccctgaccagcgctgactcagtgtttctgttgctcctcattgtatgaaaggagaggaagaggccagcagtgcccttgaacccactgctggtttgccagtcatggtgggttgggatgcacacctgtgattccggtctccactttgaccctgtgtttgtgctttctgctttcatcactgtatgatgaagcagctaggagcacaggaatttctcttaacgtctaactttataccacatgctgacagttagtgcctaaagtacagtgcgtgtattatttttaccctcttcacagcccgtcgtgtccccagcaggagagaccgtggagggaccagggacaggcgcttaggcctgtgactgatcctctggattctgaaaccagagcagccaccctttttgctgacattaacctggagagtgatcaaagcacaagaaaggggataacttaaaactattggtatttacttagttggaacattattttacttatttatttttttggcgatagaatcttattctgtttgccaggctggagtacagtggcacaaccatagttcactgcagcctctatcccctggcacaagtgatcctcctgtctcagcctcccaagtagctaggaccacaggcacacaccaccatgcctagctaatttctttttttttttttgtagtcatggcgtcttgctatgctgcttaggctggtcttgaacagcctcaagccctcctcctgcctcagcctcccaaagccgaggattacaggattataggcatgagccagcaagcccagtctagaacattctttatccttcctgttttcctcagatactttcactctttttttaaactttatttattttttatagagacagggtctcactatgttgcccaggctggtctctaactcctgggctcaagtgatcctcccaccttggcctcccaaagtgctggaattacagcgatgatattttcactctaaaaagatagaaagtatattgaccagcctggccaacatggcgaaaccccgtctctactaaaaatacaaaagtcagccaggtgtgatgtcacacgcccgtaatcctagctactcaggaggctgaggcgggagagtcactagaacccgggaggcaaagattgcagtgagccaaggtcatgccattgcactccagcctgggtgacaagagcgaaactccatctcaaaaacaaaaaaaaaaaaaaaaagagagagagaaaagaaagtatacttatgtctgtatgttaaattttgtagaccagtatggcagctccatccaccatccagagtaggtgccttccactgtgcatcactaaggacaggatttaactgcaagctcattacaactaaagcagtttgtttgtttatagtttaaagaggaaggtttggtttaggtggagcaggaaacattgcattagtaacatatttcttgagcattctgcacagaattacattagaatgtaattaaagaagtcaaatgagtttgtattttggggaaaaaatgctgaattttcactcctgtgtcattctgtaggatagtgaatattacaactctttgaaatggatcctggagaatgaccctactgagctggacctcatgttctgcatagacgaagaaaactttggacaggtacatgtgggtaaccctgggaactcttctttagctttcaaggggcatttttcttcttgacgggctgtaacacaactttgctggaccatcagaaacaaccagcaggagctgcaggtgttaattttcatctcattgtagcagcaccttcttgtcatgccaagacgccacactccaattacaaccatttctctcttccagcaaagttacagaaattccaagaggccttggggcatgaaccagcacctcttctaatccaaagcaaatgtgaatgtttcatttgtgcctcggttttagaatttaggtacttgaaaaaatagtgagattgttgacttagcgatgtaaatacatgaccaggagtgggtgatgttggaagggccattggtttttctctctgttttatggttctgttgtcatggcgacatttgtcttgtgaggctcagcatggcaggctccggtttttctaccattccctctgctttgcccccacgctgttattcaggctggactaatcctcaaagtcagtttcagactggtcagcagggatttggatgggccactgaaagtggatttcaaaggtaaagttgcctgcttggaataattctcatcatgctaaggatctatgcgatgtatttgtctcaattctgaagcctttgcttcatctgccactcagtaataatgatgcagcttgggaggtgttctcaatgtattctctgaccctggtacctgtccttccgcaaaagcccagaggtatttcccatccttcagactaaatctccacggctatgaaattaattagaccatagaactcattgtaatggttgccctctgaaaaatgaaatagacgtgttctttattgctagatgtcaaagattgctagagaatctttgagaaaagaagctgatgccactagaggatttaatgacaactgagggtaaaaattgttggataagaaaataatcacattaatatcagaatcacttgttattcccatgtcctgtgtttgagccaggagagttcagtctctagtgtgagtcctggtgtgggtggaacctggggagtccatagggcccttcagtggctaggcaaggctcagagaaggacttcaggcaccagaggcaagagaccttgtggcttaatgtaaatgatcaagtcctttaaaaatctccttttgtgccccctccccactgcccccctttcccggcctcctccccaccccactgtgttgtgcttgatgcctgagaatccttacagacaggcggacactgttctcctgcacggggaccttgtgatggggcagggaggggtcttttcagctgctgcccctctggtctccagcagcctccccaggaccgagagtactggtgtctccagccctgtctacctccttcctctgctgcctttgacacaaatagctcactccccccagagacacctgcaaggcacagtgcctttcactccgggctctcacccctccccactggtctccagtcccctggaagtgcatgctcctctgctggccctgtggatgcaggtgtcaccctgccagctgtcctgcacccgctgcttttttgtctcacccttgctatctggatttcctcatcctacctgtggctccggctgcacccatctccgctcaccaccagcctcttatctcaggccggcgtctgccttccagcctccagaattcccaggtctaacggcctcctcaactgcttctcctgagaggctcacgggtcccagtgctaaagccactttttcctccccagcccccacatcggttatggtctcatcagtgccaccactgtcccctcccacctgacacttgggcatcccctcagaatctccctctctcctcatgccatctcccctcctcatgccatctccccgtgcccaggcttgctgtgccccgtgactccccgtccttggcacgtccctgtctgtgcactcccctagccctgctccgatcacttcttgactgctgttctcacagcctcctgtcggccgccccctttcctgctttgctgttctccagtgccctgttctctagtgcctaccctgttctccagtgccctgttctccagtgcccgcctagctgtgagccccttatggactatttctgaaatgcagccctgaaaatgtccttcttctacttggccatcttgtgaccttcagcataaatgaaaactgttagcatggcatatgacccctcataatccagacctacccccctctggcattaccctctgacacctccttcctgtcaacctgtcaacaaacagtgtgccttcaagggtttccccagagatgcttcagtgccacattgctggctcgacactgcccactctgtaccgatgcattctcattctctctcccatcacctctttccctgccatcctcgaggtattgactgacgtgctgtgtgctgtatgccccctgaggtcttctgggtctctccagggctcagcatgtagttgatgcctgccagtgctcattgagcaaacgaatgaggagtgctaacctggcttattaaaaatatgaataaggtggtaagtaatagaaatcctaagtgtgagaaaacaaaatcagtcaagtcttggtggctttttttaaaaagccggacctattgaagggtcttaaactgccaattttcaaacgattagacatggttagtcaccctggaagtatcttcctttcatttttaacatatgaaggaaggagtggaagtaaagaaccaaggaagactgaaagtcagtcttgtgtgtcacatgcattaaaaaagtcttttcgtagattcattcatagaaaaccatatgaccaaattaacccaattcagaaaactattaagccacaatcagaagcaaatgatctgggaaaccttcctaattacatttaaatgtaattgtttccacctcataaatgaaagtcaaacacagggtgttggagtttttaagcaggcctctaataaatcttctgatgatcgttcaggccagattttcattaaaaacagttctcagacctcctcgtttaatgttgtgaattcttctgacttttgggtaggatcaagtagagtaatgcattaatcaaaacagacccatgagatgagtaagataagaattaggtgcccagtttgttgaattactgccttgcctttttgagagagctatcctgattaacagggaactcacgtatttattttgcactctgggaaggaatttagagcaagttaaatagctgcatatggatctcatctcccatatccagtccatcagcgagttgttcacacacctcccaaacctttctcatttctgtgcattctgccgatctcttctctcactcacacccaagtccaagctcccatcttccccactagacccccgacccgtctctacatccaatatggcttcttataatggcagagtggtctttttggaatataaaaatgagcatgtcattcctctgccagaaaccttcaggggtctcccctgcccttgagataaagaccccaaccttactttgtcccacaaggtcctgcgtggcctggctctccctgctcctcctccagactcactgtgaatcacaggccccactgggcttgtccaacacaagccccttcctgcctcaggccctctgctttctcttccatctgttgggagcatactccctcccagtctcagttcaggtgtcccttcatcagggaagccagcccttgacccagaccctatgcatcttccatgcctgccctgtggcatgtaccacagacgactttgcatttgtctgagtatgtttgtgtttagtgcctgtctctcctgctcagcttcctcccgatgatggcagccgcatgcctgccctgtgctcactcactgtcgtgtacttcccacaagcactttgcctggtgcatggtgggtacttgtagttgttgatgtggaaatctaggtgttagcatgatgcccggacaagcctctcacctctttggccctctgcaaaactgttgactctgacccagaagaaagcccattcctccccaatgccaaacagtcaagtcacttccacagtggggcaaagcaagtgcagttgtcatggggtgaaacagacatgcagtcagccttccacggtgtttcaaccttctttttttttaatttcacagttagaaatatcagaccatgaagtttggtagctgttccttcatgtaatgaagctgcagctgttgccattattttgcaatttgttttctttctgattggtaagaatctggggctgctggtttctagggcctaatatgaaagtttccactgaagaaatgtcagtgtttgaactatgatcctgtgccaagcaggaagaataagccgtacccccattcactgctgtgcacacatacctgcccccaccgggaggaggggcccttttagggctgtaacaagtgaaaattctttattgcaagttcagcagagcaacgtctaatttggttatgggtttgtttgtttgtttgttttttgagacagagtctcgctctgtcacccaggctggagtgcagtggcagaatatcggctcactgcaacctctgcctcctactttcaagcaattctcaatgcctcagcctgctgagtagctgagactacaggtgcaagccaccatgcccagctaatttttgtatttttagtggagacaggacttcatcatattgcccaggctggtctcgaactcctggcctcaagtgatctgcccacctcagcctcccgaagtgctgggcttacaggtgtgagccaccgtgcttggcctgatttgattgttttgaagagctgccagaagtttcaagaggctgtgcagtagttggagggagaccatgggcagcagccatataggaaggttctttaggatcgggtcgagccagtctccataggaatgattacccaaagggaacaaggaggacatcatctcagacattgaagtggttagtggccctcccagaagccacagcacattccacaggtgtactgtggatctctctgttaagatttcatggagagaggtgggccactggcagaaagaatctaaaaaggctctttagggggtgataatgaattaaaaggtagagaaacacttgggggaaggcagtgagtgaaaaggcagaaatggtcaatgagggagagggcagagcatgtcctggcggaagccaggagccagacgaagagcccggagctggaggtggctcccaggagcgctgaggccccggccccttcaggccagtcagggacacagaggggtggcacctggggagacgggaagtgggaaggctggcatggacttgctgcctccctgctgtcggtagttgcgctgctggagaggctggggaggatgaggaaggcctggttggtggagtgatgggggtgcagggtgctgactgcccccgaggccgtgccctgcaggatttgtgagcacccatcagtgggcgtttgcccagcagtgctccgtttccaagaatggagtctgacaagcagataagccttgctccacccaagtccagcatattccatatgagccaagctgtttctcagcagcttcccaggcagcgcaaagcatttatggagggtcagggagatgtgtgggaatcgggttgttaactggccaaggcagggagtcccccagaagttcctctgatctctgtgaggaagagagccaagtttatgctggggccagtagacttaaagaggaatttttctactgcagtgttctcccacgagctcttgctgagcgcctgctgtggctgggcattgtgttccttgtgtggggtcctccaggagcccaggcacaggagggcgatggcccagaaagccctgggagggcggggtgtgcgtttcgtggctgaaggtggcaagaatccaccccacagagcaggctctgcagactgctcaccagggagcagggcccctgggtgccagcaccagctccatctgcagttcgctgtttctccttggtcactttgctggatttctgcctccgggatgctgtccaccctcatgacgggggccagggcgctgccgcagcacctataggagatgcgcagggcagagagcagcccctgtgtgacgctgccccgatttctcccacttagggttgacactgtcacggtaccacccggtgttcagtgctgaggacatacagtccctcccctcctgtggtggcaacagctgatgttaagaagggacaaatttgggcgaaaggagaacacaggctgtagttagagtgatggtgagacaggaatgaaggcccgcagggaatctgtgtgcctggaggcgagcattagagtcagatagccgcctctccaacccccatggagcctcgtgcccaaccagcaaggactctggggcatcggccagtggcagtaagccagtgtggtgggctggacaatatgcctgcactgcaggagacggtgtcacgatcagcccccgacagccggtctcaaaagtggaatttgaagagtggtcattgcttctcatgaaagtgtcgccgtaactcatgaaagtgtcacctgtaacgaatcctagagggatgcatttctgtaccacggagggctcgagccgagacaccgagatctgggggcgtgacccctaacctagtagcttagggagcagaattacaaacccctcatcctgtgcccatccttgggccctctcctcactcccccacagagaaacccagggtcagaatcaaccatgagacttgacggctgcccacaggatgatttactgctgtgacctcatttagcatgggttagtgtgggcccattttttcttttctttcaaaaattatttatttatctaattataaaatattaacctccataataaaaataaagccagtataataaaaatatgtaaaataaataaatgtcacttattcccagtatctcaagaaaactcaggattaaaatttttatttacattttccagaattattctctgtaagcacaaaacagatttttttttttacagaagtggaattgtactctgcatactgttttcttttttattttatttatttatttatttatttatttatttatttattttgagatggagtctcgctctgttgcccaggctggagtgcaatggcatgatctcggctcagtgcaacctcagccccctgggttcaagcgattctcctgcccaagcctcctgagtagctgggattacaggcgtgagccaccactcccagctaatttttgtatttttagtagagatgggttttaccatgttggccaggctggtctcgaactcctgacctcgtgatctgcccacctcggcctcccaaattttttttattatactttaagttctgggatacatgtgcagaatgtgcaggtttgttacataggtatacacatgccatcgtggtttgctgcacccatcaacccatcatctacattaggtatttttcttaatgctatccctcccctagccctccaccccatgacaggccccggtgtgtgatgttcccctccctgtgtccatgagttctcatcgtttaactcccacttatgagtgaagctggaaaccatcattttcagcaaactaacacagaaacagaaaacagttttcaaattaatatatcacacataccttttcatgtcactgaatatcagtctataacattctaatgactgtgctgaattttactttgtagacgtgccatatatttttaaccatgccctgttggtagacgtttaggctattttagtattttctatataaacatataattctgtataaccctggaatactcacatatatacataatatatatagcatacaaatgtataatctggaatatacattttgtgtacttgactaatttttttccattgctataaactccaaaagagaaattactgtgagaagggatatataattttaaaattgtgatgcctattgccaaattataatatcttcagaaaaagattgaaccaattagactcccacccacagtgaaggggagaaccagttctctgcactcagcaacactggcttattttctctctcatccctgggcgctgcttttggaggaagcagagtgttttcctccttagccctcccctccccactttgtctgtggccgacccgctcattcagtagctctctggaaattacaactttcaggcaacaccaaagaaggctctgtgatcaaagagagagggctggatgaatgctggaaggagtgtattacagggattgtggatgcttatctacttgacctccttccccttccctgtgcgaggggaaagggtgggaggaaagattcggcttgagtgtagccgagctgtaccgaaagccttctcgataccaatgcctgggctgggatttattaacttgtcattgacgtggatctgataagaaaactcttaccgaaggaacaacaaggcagtctggggaggaataaatggggaaaagaagaaaagccaacctgggtttattaacacatagaacaaaaggtatggatgagcactgtccacgcacctctgagaaccagccacgaactggcagagtttcactgtagaaacatccccaccccacccccaagtggaagctgtttggcatcctccatccccaacacggcctgtacggggcaggagcagatgacccctgggagaaaatgggatgcactgggaagatggcagctagaaagggaaatggagaaatgaaggatgtcagcaaaaccggaaacgcagcaaagggattaaaattcacattgggcacagtgaagagttcagttgactttgcagaaatggaaagcatagtggaaaaatgagattccttcctgaataaagagaaaaagagaatgtcgagggaccggatggatgatgaatgtgttttacgttgaaaagccatctcagtgtgaatgggaacaagagccagtgcgtggagaagccgcatgagagacccaggtgtgagtgctcgggtcagaggggctcaggatctcctgggtgcaggtggcaggaccaaggaacccctggaggtggcctctgccagggcatagagttcatcacaacatggaacctccatccctcctgggtaccaccctaacacttactttggaaaaccctctcccctggcttggtttactctataatgcaaccagcaggcagaggaaaaaagatttagagggaaccccaccaaaatagtggcatggctttctttcagtaggagaggtgtaggtgctatatttttccaccttttttccccaaaatttctacaatgagaaaaaaacattttattttaaaatagtaggcctctctcccttccctcacgctggttactgtgctatgtggccttatggtaagctaggtctgggtcagggcataggagaaagggctgccctgattgcagctgcttttttcatgatcatgggtggtgctaagggaggaagcttcagggcagatgagtgaggagaaggcgtccaatgcaaataaatgccttcaaaaaccagataaatctgtctcttcagcctggatccttaagcttctttcttgtctttaagtttctgtttgcatttttgaaagaaataccatgcatcctttttttatgactagaaaatataattttcagaaacagaatgcattagaatttggatttctggagtcttgatgggtgtaccctgttcttttctctgttaaacataattagtttcctgataaatgaatagcagaggaaaaaatgttgctcttcattattgctaatatatgaagaataattaaaagtcataaataaccataaaacaatttgcctttaatgatagcatctttaactgtgtaacatcctagcaaaaaagcctcattggacattctcttgtgcacagagcccatttgccgggaaatatttctgaatacatgttgtcttccctttatagtaagacattgtcactcaataataatatgcaagataacttcgtgatagtaattgttgttttgtctttgtaattacagacatatcaagtggatttgaagcccaatgggtcagaaataatggtcacaaatgaaaacaaaagggaatatatcgagtatgtatacacatatttactgccttttctttgaataattgaaatgcatgtttggtcactgtcccttgctgaaacagctcatgcatttattatgggcatgagtttattggtcagttttcaacaaggtaagttcttttctggcttgggctaatgggaagttgaatatgggatggaaagtctgtcttgtatcatgactccattgagctgccctataaaggagcagaggagggagaaaaggtctatattattgagtaatacggcaaatactcttttggaatatgtggatatcaactaagatttagaattgcaacggagaaccacggtgtcagtgaccagcagggcaaaattaggaaccaacaaagaaaaaatattttgtctctctcccaacttcttttccataatagaaatgtatagaaatagttaaaatggataggaagaattcagcatgtgcaaccctaaggaattctttctggtatttgtaatattcttaactcaacttcagcctcagtggaacaaaatgttgagtctttttggaagtctagctgttaagtgattctaagacatttgtaccaggcagaagtttttctctgttgggcacgttacgttttcttttttagtgtatatgtgtgcttcaaatgcataactctgggatcttccaaggagatcccctggtgcaggggtgaggtgagcactgcagtgtgtggttcctggcacctggtttctgctctcttgtgggtcgccacagtggccctgagttcctcgtttgcattcagtgcttcgtttcaacaggctaggctccctcctttcttctcatttggaattggtcagaggtcttgaaatcagacagctcttgcattgactgtgggtcttagcacctttcagtgtgatctgcaaagaaaaacctactgtccttcctaattaggaagaaacggagcgtgttagagtctctactcagagatcctggcaaggagtggaactattacatggcggactcttttcactctcaagttgaaagcttgttatgctgaatacatagactagaaataaggtacctcggttcttacctggccacattaattggcactctcgttctgaatatgaacaatcttagctgatgacatcctggcagacaccattgtcttccttcagaaagtacagactgtgagtggggtttaaaaaatattctagctcagggtgacccaggtctcaagtctgaggactctgacatgcgtggtatgtgtcttgcatcattctttgcagttaattcttttagggttcaaacgtggtgggagtcagggccaggcagggttccagctagctttacttttaaaagtataattgaaatcaccaactgctccctgatacctctgctcccctggtgccagaagaatgctgttgagctgttcattgtagcccaggaggtgccacctgagaggccgcacagtggttgtgctgcaggctggtcctcagggccattaccatggttacagtgtaccaccccgaaggtgagaacccttcagaatgatggaatgcctgagatgacatccagagtacatttgccttgcgatcagttttgctgtgcattaaacactgtcgcagggaacttggttttggtgaacttcagttgcataaggaggtcttaccattcatcctctaaattttggcattaaattatgagtgcaaatcattttgctgataaagcttatatgttattgttgaatattagcacattggatactagaatgaaatattagataactaaatgcattgtcctgagtacactttacaaatatgtatacatatatgtgggtgtgtatacgggtgtgtgcatcttatacatgtatacctgtgtgttcataccccatgaacttttcccttttctccatgttgtcacattttaaagcagttaaagcatttaaagcattttaaagcagttaagcatttaaagcagtttaggtcagccaaaccttgatgtgggggaagttaattactcttttgaaatctccagtgagattttaggtttttcacgggtgttccagggagtcttgaaagaagccatgaataaactaaacagtgggggcacagaggagaccctcccctctgctctgctgtcgtggatggaggagaagcactccctgttgcggagaaagcagtgagcactagtgatgatggaggtggttcaatattgtcctcttttctcctgcagcttagtcatccagtggagatttgtgaacagggtccagaagcagatgaacgccttcttggaggtaagccatgctggccagggttctctgccatgtgcctctggtcccgggtcgatgggggatcgcgcttctcctttagctagtgtggtggagctgatcagagacagaggcgaggctggggaccctgcaggaagaccgggatcgcacagctcacaccgctggccagtctccagcacaagagtgttcagccaccgtgccgccacctccttttccttttcacgggttctcctgcttgacttctcttatttttacatttgtcctgtttttaaagaggacgttttacagacttgatctagaaccattgtcttggagtttcaggcggtacccaagagaaggctgccttttgctgcagtgacaggttccaagaagcccgagggctcagagctgaatgatgaagcgcagtccccaaagtgcctggccacccctccctccctggatcactgctgcctgggcttgattgattgattgattgattgattgattgattttgagagagattctcactgtcacccaggctggagtacagtggtgcgatctcggctcactgcagcctctgcctcccgggttcaagcaattctcctgcctcagcctcccaagtagctgggactacaggcacgcgccaccacacccagctaatttttgtatttttagtagagacggggtttcaccatgttggccaggatggtcttgatctcctgacctcatgatccacccgccccggcctcccaaagtgctgggattacaggcatgagccgccgcgcccagccatggacatttttttttaatcccctgccctttttctttgtggcataattcattgcaggttctcttctatacagatacatggaaaacacattttcttaagctgagtttttatttattttatacccagccacctcatgacagcttttaccctgttacagagcaaagtgggcactgcccagatcgaacttttaatatcagggatgctcccaggcccctagcagtgggtgagggattcatcattttaaacagtattccacttggaccaaaagcaaaattctttcttaaatatgatatagtattagttacctcaaagatcacacaggaaacagcctcgtgtccacgtgactgattttctctgcactgaggcagagctctcgtggggtgatgctttcccttcactcaggtacctacacaggatgcgtgaaagcccgggcagcacactcagaaacagctcggggccttagggacttaaaatgggaggacagaatggcaggtttcactctttatttagataagaaatcccaggaagcagattcctgggccccaccgcaggcggtccacaccttcagaaacgcggcgttcgcagcgcgcagggcccagcagagctgagctcatcctagatcacgccacagttagtggtacctgggaactggagcatggttttctgtacgcacagtgtctgcacccatcacctgcctccctctgtgtttcttctccctgcctccagcacgttatttttaagcgtgtctcttacacatctgtagcctgtgcatcttaggacgcactgactcacagcagtgttataaatggcttttggaatccaccctgcctacagtatcccatattttcatcaggtttcagaaattactccactacttgaatcttctagattctatgctttttcgaaactgttatattgtgactgtgctgtttttactggaactatagttacttgatactgtcactgacataggaatcatcaggagagattatatttttttctggctaaccagaaaagtttgtttttcctgtgaaatttttttttttgaaggcaataggtgtttaagatgttttttttttttctttcagggattcacagaactacttcctattgatttgattaaaatttttgatgaaaatgagctggaggtttgtattataaacattattttatgtaaagtggattttttaaagtatctctcattactttacaagtaatattttaatattcttggatccataatgtcctagagagtaactttagatgaattatattacatgtctcttatagggcttatttgccaatgtggttctattacatgtctcttatggggcttgtttgccaatgtaggagtaaggaacagcaaaaataatcagctgtagttgccttgtccatcagagggcagttctggaacatgcctagtaagtagaggccactgagcagagctgggatcatggccctatgcaccaggcgaggcaaattgccacaacaagtagaaacaaggtttgcagtagccctctggacagcagaaacctgcttacactaccagactggccaagtatcctctgctgcatccccatccacccccaccgtggcagccaaatgggggtcttggccacaaggtggccgtaagcatctacttgggcctgtagaacgacgtctcattgaacttgaagtggtttatgttgagtgaggaaaaatgtcagaaggcaacagggttgtagcaaaaggtagtttagtgattgtctagttcagcttcttggtgttgacatagttgagtaacagccattttaaaaacaaaggaatatctcgccctttgttgtgtcgagagaaacaggggaaagactgtctgttgagaagccgttggtgggactcggccatttgccccgtccatagccagtgagtgtttcccatacactggccttctatacttttatctcaaaacagaaagttcaagatcgatgatgtctatagaaatcatatacctcaagcctttcctctgataggtgggaaactgaggcagagagcagctgggtttacccagcaaggttttggcacggtcaggcctaggaactttatttccaggcttctggcttagttctgtttccatttcattctggtacctttgcataaatatcttccatttgtccacaggaaacctcccctgatggagagttgcataataggaacggcaaaccttagactaaatgctaagtcgaagacccagttgtgccttagcgtatgtctgccattcttaggcctctgggcagatgaggtgatttgtcatcactggaattgatcaacctggaggagagtcataagcactaattcttttgtgggtagggagatgcttttagatattcagaggaataacctctcaggaggagaagcagccagggtaatgcacagatgctgctggagcgtgagagaatccacaggtcccatgcgtaagactagaggggtagggaggacgactgtggcatttttatatccgatacgacatgccgtggcttgcgcaaggttcgaattgagctgccctcgtgactgctgcctctgtgatctgctatggcaggtggagcctggaacaggtgtctgccttcctctgttgttatgatttgctagcttaccttcgcggcacagtgaccacatgctggcactgagggtggtcatttctcagtgtgtgatctcgcacctttcacatcctgcttttacatctggtaaattttcttcctagttgctcatgtgcggcctcggtgatgtggatgtgaatgactggagacagcattctatttacaagaacggctactgcccaaaccaccccgtcattcagtggttctggaaggtaactccggggcccagccccagccggtgtcctccacctgaggcaggattgagggctgtgtggcgccctccattgtggtctgacttcaggactgatgctggctttggggtctgttagagcttggactgctgggggagggaagaggcaaactgagccagcagccccgtggtggctcctctgtaactgtagcagacagctagacttgaatgaagttggtccctacaaaagcacactggccttccttgaccacctcgtgaaagtgacttttatttgagggactggtcctccaatgcgtaaatagaaatggggggcttctcagggcagaaacaggcttcagggatggctttgcaagatgccactttctgttaagaagtcgttttctcaatttttaaaatatattccaacaaatattttgatctgtgtatctttcaaccaaagataacacaacatttgatttattatcttagggccactgtttgtatcctgttcagcttaggagggaagtaaaataggaatgggttagtccaaaggagatatagtaaacaaacttaaaaaaaaaaaaacagttatcccccaaaaaggctgattatttacttcaccccaaaaaggaatcatttaactttttcaaatttatttttatttatttatttattttaaagatggggtctcactgtgttgcccaggctggattcaaattcttgggcttaagcaatcctcctacctcggcccctcaaagtgctgggattacaggcatgagccaccatgcccggcctttttcacatttctaaatgccttttattactatttcaaatgccagcaggaatacagagataaaaaagcaaaatcttcaaagcctagtccaggtctcacttggcttgttttagatgtttgcctacagcagtccaagtggcattaccagtaaagccacctggattcccataataatgcagatatgtaagatacacagattattttagaaccccatctttgcctttgttgttttgtttttgttttgttttgttttgtttcattttataaaatgatgtcttctagggaacgtgtctacaatctgaaatcccatctcataacctggcttccccttgtgatgacaaatcttaaatactgtatatttataattggcttagggggaactggtaagcctcgaacacagaaacatgagcttggtgccatcagagagtttgctttttatatcatttattttggcctattggcagaagaagaaagagacggacattgtgatcactcagtctcttagattagagaggccagctagtattgtggccataaaaaacctactcagttttcagagtcaactgtctaggtcttacattgcaatataaataagattaagttctgcctgcctgcatgacagcagcatgtgccatgggtcacgtggggggtataatgaccttctgcctctgttcataggctgtgctactcatggacgccgaaaagcgtatccggttactgcagtttgtcacagggacatcgcgagtacctatgaatggatttgccgaactttatggtgagcaggataccattggattcagttgtcctcctgggaatttccagccaggcatgaactctggcccaagaaccctgccgccaggcctctgcagaaggctaagtttcaggacagtgtgccatgcataggttccatgaaagttcaatgaaagtactgttatctatactttatatagataacatggtgcttctacttcgagggattggggggcagtttgtgaagaggtccataaggctgctcttttttttttttcctagtttagttttttagtaaatcgttaaaaactaggttttgtagggtcatttatatggtcgtaaactgaggtataaagtcacctccagtaggcagaatttttcagtgtttaccatagatttaaaaatcactctgtactttgcatactgaaagtcacatttcattcaccctcccacccacaaaactagtttgaagtttaaatttccagggcccagctgagaggctgtagctgcctgcctttccacgtaactgttgtgtttgttaatcttggtgcagttccattctggagactaagcagagtctttctgtgaggttgtgcagacctctggcttccctcaacattaaatatcaatgttgcagcagaagagagtgtcttgggcctcacccctgggggcaaaccctgccctgacagtagctggactgcagaccacaccatagcttcattcttctgccccaagcaatcttaacatttctttttcttttcttgtctaggttccaatggtcctcagctgtttacaatagagcaatggggcagtcctgagaaactgcccagagctcacacatggtgagtgacaaaaacacatgcatgtcaatgcaatatctgaactgcttagctgggtatggtgctgggctcaaggctattgaatgctctgtttcctgtctgtaagtagcttagagaattaaaggacagtgatgtggatgaaaatagaaattgtacagtagtgctaataagacataatgcactcagtatgtttggcacataaagggctcaggcctccctgctgtggggaatttctcctctgagcccagtccttccctcattattctaggtagtggagctttcactgttcagcatacatagataaggcagctctcaacctgtataataaacacgttgggtttttactccaaccttaaattggttgagaagttaggacaaaataccctgtagaaacatcctttttcaaaggccttctatgcccatgaataacctgtaattccctggaattgagcagtaacatgactgtggtcggaggagggtaagagggctgacacgtggccagggatgcccaagcgtggagcgtggctgccctcagaaggccctctcaggaggcacagtgacgcagaagggtcccagttgttttctgaacagttgcatgaaacccagcacaaatgcagactggatgggatcagtttcttgaagccgggttcagggagctcttgctaactcaaactcccatgtccctcgtgttggtttttctgcaaaggcctttatttcttgctcctgaggaagcagcagaagtgggccttctggaaaacggtgagcagcgtagccctgtgtttctcatgcagcgggggctgcaaagcctgctctggccatagtgagctaacataagcaaccaaacactccctgcaggaaacgccctcccttacactagaagtgctggccaggagagaattctcatgaacatgtgtttgcgaaaaattggctgtgaaaggtttttcacttctgtcggattcccttgcctcaccagaaaggtgttttttttttctattcgtaccattcacgtgactctccagatggaaacaatgtggtcattgcctgtcagagccttgaaagcaagctgactccagcctaaaattcatgaatattcagagcagtcattgtccgtggttctctggctttattctaagggaagaatgtttgagtagttcagagcttttatccaaatggtgtccaagtcatatgtggttttctgggttctactggcctccatatgaaggcaccagcgttgagccaagccccaggactgtgggtggtgatgcgaaactcaagctcataatactaaccaggatgaagattaggaaaagcgaaattattgggcacagtcatcatctgtggtcaggcactgcttaatctttatggcagccttatgagatatgttattcccttgggctgtcagaaggctggcccagggctcaccagagtcacagattcccagatcacaggatttgaactcagagctaccagaattagagcctgcaccctttaccactacaccagatacactgcctctgttgatatacccactttctttttagacttttccaaggaaaccaaattagtgaaccaatttcatgttcattcagcccatgtttctctgtgacttcagggacacatatcttactattgaactgtcttttttatttcggagcccacatgattctgccacaagtagaacttcccagataagacctctgaactcagtggttctcaacctcagctgcatgttggaaccatctagagagccttaaagaaatcactgatgcctggaatttggacttcattggtctggtgtgtgacccaggcagtgggattttcaaagctccccagatgatttttataggctggcagggttgaaaattcacagctcttccctaggaagggcaaagatccacctacaggaagggaacaacccagctggctcttaccagaacttattttcctctttatgtgtcacggaaataaagcaactgtgtagttttcctaatgatgttctccccagactaacttgacccggatggagaggactggcagttgcaagcaacactggctagcatgagtgggactgttctgctgtttcttctaaatggctttcctccctacctgaccctgactgtattttgacataggaaacagaaacttcactggctgtttcgtggcaacagttctgccataaaattttgccatacataggtttaatttcttccacgttttatgatacacaattaaagttcagaataaaaatctgatttcctagaagagcagaagctgaaggatctggttctctgtgatgagggtacctttcattaagctttccaatggtgattattgagtgtctgacattcaaaggacttcatttcattgttctataaaaggtcactactcagacatttaaaattactcttcattaagaatcacaggcccacctgcccttttaggtagactctaaagcaaacaaaaatcatctcgttcagcccatgcatcttccacgtgaggacgctgaagccctgtgaggacaatgagctccttaaagtcacccagctcattagtgcagagcaaagccaggtccgtgtgtcctgacctctgaaatgataggaactcacactcaccaagcactctgttcattccggggatggtgctcagcacttgatgcgattgactcataccatcatcacagtggccctaagaggtgggtgatgttatgacccacttttttacagataacactgggatgcaaagcggtgaagcattaagcagcatgattcagaacctcagatcttgacatcccgtctttgcctctctcttcatcatgccagtgtttctcaaacctgaataatctgtgcaccttttttaaagggaaaaaatggtcacagattctcaagaatgggcctgagacccccatagggattgcaggcccgggactgtgaaaccccagctgaaaagcctgaagccactttcggtgaaaggctcttttaaatgccatctgtagatgtgaagtcctgtctttattaatatgataatagaaagttaaaagcctgtattagtacttgctcttttaggattcctgggttcctgagaaccccagtttgagaagcacagtgttattctctgtcttttagtgtttagtggctgttagagaatccaagtggaactcagtgggacttattcaatatttagtggttgttaaacggccctctacggtatgtgtttcttttctgttgctgtgacaacggttagcttttagtatatgtgcaagtgctgccaaagcgagcacgtgaatggttagcttttaaaacccaagaagttactttgctcattcttggaatcacacatcaatacctggagggggcggttttaaacacagtttgagcactcgcggcagaggcagcacaagtgcacttcaagagctgggctttggagcaccccagggctgtacctggccccgtgtgaccttgggcaagttacctaaccttgctgtgtctcaagctcctcctctgtgaaataggggtgaagcattagctgccttacaaagtgattgccagggttcataacattgagacaaggctgatggggcatggtgagcactccatgaacatgagctcttacgtcataatgagctgtggcaagtgtgcatgccattttcatgacagatacacatcagcaatcaccccccaacacatacacacacacacagaggtgcaggttctgtggctaaaggctctggtcttgagccccatgtagacatacagtaaatgttgaaaggtgttaacactgataccatctcttgagtaattgagcccttgctgtatgccgggcccactgatccgatccacttggcactcatatgtgcagtttccccatgtcacagaagcacagaggccatccatttgtctgaaaaccctcactattgccagggcgatttgcagcccccgcccccacctgaagcctccagatatgtagggactttttctaaatgcaactttacatagcaaatgtcaattttgcctgactttgatcagaggaggtagcttagcactggtgttcccgagccccggacagcctgggttctgtttgtgggtctgccgtttgacaaagactgtgacctcaggaaccttgccctatgtctctgctccaggagctcctgtgcagaatggagataacatgacctgcttcatagggttgtgatgaaaatgaagtgagttaatagggagaaaagcacttggcttgaggcctagtgtggaataagtaatagtattagagatagacacagtcttaattcgtgggtaactccaaaagcatcagctctgtgttccaagggtttggaaatcttgccggttactcccttcccaccaggattcctccgagatctgcatctgactatagcaaaggtttcatggaccatttgaaaatgttctttctctgtaaattacaagagcttatttagtgtggatgtttcatagctagaggtttttggggtttttttctccaggtaatcaaaattgttggttaaggcttttttattctcttactcaaacctcatgccctattaaccagatcgaggaagtgctgttgtggcttttcacctacactttttgttccttttgcagctttaatcgccttgacttacctccatatgaaacctttgaagatttacgagagaaacttctcatggccgtggaaaatgctcaaggatttgaaggggtggattaagcaccctgtgcctcgggggtggttgttcttcaagcaagttctgcttgcacttttgcatttgcctaacagacttttgcagaggcgatggcagagagcagctgcaggcatggtccctggagccgagccttcaccacgcactcgtccaagttcggatgcgggaacctggtcccagcttgagttcctgcctttcccaccacaaattatcaactggttgatgtgtacactaattacatttcaggaggacttaatgctatttatgttgtgcctctgcaggcaaagcccttaataaatattttacatcctttctaatgacaatgaatggaattaatcactcaacaggtatagtattacgactcatgtttactttttaaaatgatttagaccgattttcagattttatttcgttatgattaaagatgtctcatgtacttggaaaagtgagcatttttttttttttttgtatttcactttcataccaggcttaatgtcaatgacatttttatttttgaagtactctgacacctccaccctctactttattagaattggaaggcaaatttttgtccaaaaacctacagacaagtactttgagagaatttccaatataatattagacataatgataattttttccatactcagaatgaaaaactggatattacgtttttgttttggggtttttttgtacaaatttagctaatagctacaggctgagagaattgtaacatagcatgacaaattttgtgttgacttgaaaggaatcacaccattattccttagaagtaattacatgtgttctaacacatttgagacagggttggactcccatttctcatccgagaaattacttaacccttcctggcgctgtacagtcatcttttattctatttcctctttgctgtttgtagtagagacattttgaatgaaacttggcactgcttgattcaaaactgtggaaaccagatctgtttagtctcctgtttgtatgcgtttgctaatggtagctaaataaccagtttttgttgtaaatgcaccaattctgaaggcactttatgtactacatggaggtcatatctggttttgtttttatttttttatcatgaacattaaatgtgatgatgatttcttttccctgcacacatctttccggtgcaatatctatcaattgtgaatctggctgctggtgtataaaaacctggatgtaaagctgagcctacagacctgtcctcaccaactgttttgtgatttctactcaactacaaagatttatttaatgtactcttaatctaactgagttttgttaccaatgacctgttgcatgcttcaataccgtgtactgcctgagttgtgcctcttgtgtgctagattaaaagtgagacagagacttgacttgatcctctgagctcaagctattgagctggtagtggcagaggactgagggtacctgcacagtttgattcttttccacgtgtaagtctccattgcagaattgtcgtgctttgagaaaacacctgaggcagtgtgggagttgaacgaccctgctgtcctttttaacctgtgttgtcctagaccctgtcggggcagtcaggggacactagagatttgatctcatgcgagtcatcaataggacaaaaaagttgtggtttggggaggtctgtttgttacataaaaaggacctttcggtgtaagaaattgccgtttttaccctgccctggctggcatgtgagaagccatggaaggttgtggttgtaaatgagttgtctaaaggggtgcagaggcctgaggtttctaaaagaaggtagatttctacagagctgagtgttggttcctttttcttattggttgaaaattacctggtagtgatcagaaaacttagatgctatgtaactaaaaaaaaaaaaaaaaaaaaaaaaaaaaaaaaaaaaattcccgctcatgagttttgactattggtgagatgttttccgctacagttaacatgacaaatgtctcagtggcaaaaatcccctttttgtaagcccccatagtctagaggcagttttctttttaagaatcatgccagagcctgagtcgagcagtatgctttcttggtttttgagagtaattgtgtaattgtagagggagaaatccaattctaacctaagaactgggattcttctgtcatcttgtaaaccgtatattgaaaaaaacagaatgtcactaaatgcatattaagtcaagtattggaaagtataaaagaaaaatcattctgacaatttctaagccagaagcaaacaagaattactgaaatctaccccatgaatacttggaaggcagtaattgtgagtgacacctcagttcatcaaccccttaataatatcagcttaattttaatgacaactaaatatgctgaagtgaggatttagtattttttaaaaaagcaaaacaaggttcagtagtcctcagcaattctccaagtttctctctttgcctaaaatggtcatagatcttgatttctctgaatcgtgatgaccacacccagtcatcttcacagcataattgcaggtggcagtaaagagagtgtgctgggtaaggagcagttgctgggtcattccttgggccccgacctgcccggggagtagccctgggggagagagggcagtgttgcctatcccagaggtcccagcagtcacactgctctgcaggccgggctctctttatagccagagaaatcaccttaatgcagtctctttagttgtctgctgaagctgtagttattatgggccacttacatgaggctgagaagtacgtgccggagctcacacactgcctgttgcggttctcttaacatcagttatcacagctgcctgtgggtcccgggtatttccattcctgccccttgttggcccgaggaaggatgtggaaagagcacctggtgggatgaaggtccaacagcctgtgcctctccactgctggccctggagccggcagcagtgaggcattcattgtctgtgttgcggtgtattcccagcttcagtgctcttttcctttttgcctgaaatgtttatgcttctctgcagccagtcctctaacaaatctcaagaacaaaggtaagacacttggtttttgtttccaggacccttcagaaggtgacatcagatattccctaaattcagacaatgagggatacagagcgacttggcatgtattatttctcccatgtaaggacaaagggacagattattattgttatttctgagacagagtcttgctctgtagctcaggctggagtgcagtggctcaatctcagctcaccacaacctctgcctcctggcttcaagcgattcttctgcctcagcctccccgaatagttgggattacaggcacccaccaccacgcctggctaatttttgtatttttagtagagatggtttcaccatgctggccaggctggtcttgaactcctgacctcaggtgatcctcccgcctcagccttccaaagtgctgggattacaagcatgagccaccgcacccggcctcacagtgacagattctgagaaacagcatgcaaaacatttgaaccattttctacatctcccattgttgcatagagagtgtgcaccgctgctatcttgccagatccacactggtcctcccgaaagccaggttcatacacagcaactttttaattattctaacagttacccattaacagtcgactcctgtatttctgagagtcttgtactcacctctgaaatttaaaaacgtataaagagagcctgggttaatcagttctgcagcccctacgtgacactgtgctagttctccttcttctgtctcctccttaccctggccctgcacccctgtacttaagagggagaggtgggaggtgctgtctggtatcatttgctgcctcgccagtagagggtgccgctgtgcagggtaactgcccgcctgctcccttcctgacctcccctgaccccgaagatcactacctctgtcattcaggcattggggtacatcctgataagtcgtgtcagaactgccaatttcaggactgagatgtgtttttaaaaaacaaatccttataaactccactttgtactttagattttaaaactggggaaaaatgtgatattctttggaccacttttttaatttatataagccttaatgaacagtgtctatacatttgcatacacacacccccaccccagagtgttctcagtatgtcagagaaagtgccacagcattaggacgggagcttggagaacgttttctagaaaagggttagcttcctgttggcatgaaattttccaagcaaacctcattaaacatctgttgtttgttaaagatgttccactgaaagcaacgcatgtttcaaaggcacgtctttccgttcgttggttttctgtgtgtaaggagtagcattgctgttggcgcctaacctcgcgtgcactgcattctcaaccccgtaccagtgcatcatcagaagccttcctcgtgaccataactctgtgtctgcagatatgtgttcccgtgtaagccagttttccccttttactcagactgatttcacctagattgtcacggtttccttcatgttaactttgcgtgactttgttcttcctttactactctgtatgtaatatatatacatatatacgtacatatgctgtccaaatatatttgtatatatttgtatagcatttttacacctttattgagtaatctggtttcgaaaggaggtgagagtttagtcccttctgcagttttctccaagctgtgtcctgtgaatttcaacccttggagcctaagaaaaccctaggaagatgatgttaatttgctgtcatttcctaattcaggatctatcatcaaatgaaacatgaaaaaaacagtgacttttaaggtgaaaagagtttcaagcattccaaataaattatcaatgtttcataactttttattataaacccacctcctaataggaagccaagtactatttgatacagtggtaaaaaccaaactaccttgaatttttttaaggcaacttatgaataatgctcattttcacagtcagaatagctttaaaatatggttgaatttgatacacacaggaagttttcttgaagaacaatcctttcgcttttcttttttcttgagagatctaaagagaaactgtagattgttttcctgacagcaaaagactaatgtgacaaaatgaagtcattgtaaagaagcgatgcaacttgtcaaatatttaataaagaattatggaagctggaacattttctacatcaagtgttatgggttgtttgatttaaagcttctttgtgaatgcaccatcttaattgttgtcagaggggtttaaatgcctgcagatttatagtatgttcatttccttcatctccctaaaagcgccgcacttttaaaaacattaaagtctggcagggcacagtggctcacgcctgtaatcccagcactttgggaggctgaggtgggcagatcactgaggttaggcattcaagaccagcctgaccaacatggtgaaaccccatctctactaaaaatacaaaaaatatatatatatattagccagacgtggtggcgcatgcctgtaatgccagctactcaggaggctgaggcaggagaatcgcttgaacccgggaggcagaggtttcagtgagctgagattgtgccattgcatgcactccagcctgggtgacagagcgagattccgtttcaaaaaaaaaaaaaaagtctgcccaaaacacatggcttaagcctactaaaaggatgcacatttattcttatccgtctgctgttttgttcttttattaaacttgagaattactgattttacgtaacatttgtataatccatgttagtctgttcctcaaaaggcatccttgtatacctagccctcaacttgtgtgagagttaataagactcaataatgaatccccaagttgcttctcagaaaggtgctgtcagaatcccgaccgtgtgtcactgccctgtgcaaagccggtggcatttttcctcatgccatttcattccgctcagatcatctcagactcctggagaattttccctttttctttagtactgagcttcctcttgatgtgcttaacccatcccctcggggcagaggagatagctagcggggaagcaggacatcatttagtctttggtttcttgcggcttgtctttttccattaacagtagatggcatcttgccagaaagctgtccgcagcacttggaattcctgccgcctcctccagggttatgagtacacatgagaggcacaattggacagagtcactgtgaatatttatatgttctttcttaaaaccacacatggtggaacgaattacatcaatgacacagttgctagattaatacgcttttaacctgctctgaagtccaagactcattaggcacttgtgagatggtgaagcccctggtaaaagtgtttgcggtgagcatgggtatcctgaattctgacactagctttctcggggttggctctcagagccatgttcaaaggggttcctgaggtaagaacgcagaagcctctttctgggagagaacacttctcaaaacagcttccagagagctcaggctgtagaatctctgaggaatcatttataggacttgaactgggctggaaaaaatttgagcatgagtttacttaagacccaagacacagtccttggtaagtaggccgcagtgcccagatgtgacccagtggggactcaagagggcaagaagggagagtccctgttgggaaccttttagggctgaccttaggccagactgggaaaaaggtcagtctccccaattagcctgttgctgtgttccttcctgcccagcccacttcacagtgccccgtgctgctcatgtgcctcctcccctttcctctgcaaagttcccagctgggctgcaagtctcgggtacctgcagtgttgacagcgcagagccctcccgtcacctccaggcagagtggccctcacttcacaggggcctcctggggacaaggcgtcctgagccctccgtgcttccgggtgaaggtcagagactgtccctgtgtcacgttctcccaggcccactcaaagcacaaagttccacaaggggttgtggctcttccaggtcctctgctggtcttactgccttggtgtttgaaatgacgactgcaacaacttcatccttttcttggccaggtgcccccagaaactaccttttcagatatgcccttttaccagggctccaggccccctccctcacagctctgcagccttgctgcacagttccccatcggaattgtgaggggagaccgtgtttcctccacatgcttttgcccactccccacatcagttcttggagtaagccttttttcctctccaaggaaagggcttacttgcagacgaattagtttggaagtacagtactagagcaagcacaaccccaaactgagcagactgaaactgaatagggcccagaggatgggtgagagccacattcctgtgattaaaggcagatttgggtggtgtctaagcaatacccttcctagggagttttaaatactgttgctagaatcagggagtcgagttctcaatcctgtttggccttatccagactgagtaccaaggctaaaggcagaaggttctgcgctgcagagtgcccaggtgtcagcggctcgaatcacgtgatcgcagaatatgtggccctgcagggccggccttgctttgtctaaacgctctcctttttcatgtgagtcccggggttcttgcccttgatcaatccagatatgaccagtactgtgggcctggagggccaggttttgttgtcatttgtggccttggactctgctggggcagccttgcctcccctgtacagacccagaacagctgcccctgtgggcgcttctcccagctagaaacctgagggctgatgggcgaaggtggttggcttccgactgcccccgtgggccgcggaagcgggcaggacctcattcaccccaccacctccaccgaggggcttgtctgcagcagaggggctactcaacattgagctcaggaagggaggccaggaggctgcatgaacggcccagcctgggcagttgggggcagcggggaatggacagaccaccttggcctggaggtaaccccagcagagacacggccagcagagttccatccttccgcttcccagttcgggcagaaaacccaggttttcccaggaaatctgcaagcacattaagctggtctctcctttaaaaaggtgcaaggatggagacagtcctacctgtcctgagcaggatgggccctgtgccaaggggccaggcagtagcaggctggcactctaggtagggaaggggccaaggatccccaagaggagttgacagcaagataatttaaagagcgtaagtaggccaggcgcagtggctcacacctgtaatgccagcactttgggaggccgaggtgggtggatcacctgagaggtcaggagttcgagaccagcctggccaacatggtgaaaccccgtctctactaaaaatacaaaaattagccaggcgtggtggcatgcgcctgtaatctcagccactcgggaggccgaggcaggagaatcgcttaaacccgggaggccgaggttgcagtgagccaagatcgcatcactgcactccagcctgggtgacagaacaagagactatctcaaaaagaaaaataataaagagcgtaatctacctcctgtaacacatcatcccggcatgggagtatatcttggcaaacatccgcaagaaattttgtctttcaggacagggacaagagcccaccatgccctctgggttatgccttgtcttcctcaaaattgaggagaagcccttgagctggagcaagatccaaaaagctggagcaaaaaaagcagtaggtgggaattagggccctcgtaccccggggcctgctatactctccagtcctcaatcttcgaacagtgaaccccgagatgtggagctgggggagctggccctgaaggccgagacaagcctgcagtccacaggcacgggcccgggactgcccacacctgttagatgggcacaaacggggccttcgctgcccggcaccaatctcctcttgcactggggccctgtttccatgcagtgccaggggcctcaatcattagctctttcagtgtaatttgcctcttttggtttaaaatagtctttgggggataaatattcaatttctagattaaactccttgttgaggctctttcctccggaggtccctggtggatcctcatgggacaggctgaggcgggctctctcctcgggcctagggtgtcatgctctttgtcccctgaatggggtcgcaagtactccagggccatcctccagggacatcttgctggcctctgtgatgctcacctgagccccagctggtcggtcagccctgaggctctcagccatggggtcaccctgccctcaccacagcctccctttgtggcactccagcagggccctcagccctttctgcctctctgagctgctcacctgcacctgagtgagcagcctccaagccacctgccagagcctcccacggggctgggaaatacctagtggcactcaaaagaaaagggaaggaaatgggaacaataagccaagctgccgtggagagtttatcttcagccttaagcatctttttacagagtgaatttcccctggggacagtggtcttcctgccatctgccaagcttctggggtcttcagtttaccctcttataatatttccacaccagcctaaagaggtagatattattagcaccaatgtacatacaaggaaacagactaggaggttaggagactcgcagagtggtactctgaacccaggttgtctggctcaaaggcatcatttaaccaccaactctactgcccattcactgcccctccatcaaaacctcctgtctgagaaaccagagtgtcaagacagaagaaatcatcaataacactgaaggcagcacactaaaggggagaaagaagactgggaagtggtcgttagatgtgaccacctggagatctgccatcctactgcccacacatcctgaagaacaataaactcattcgtactaagatgtgaatgactgataggctaaacacatgacccttccagaagaatttttattttaacaaataccaaaggtgatgcttggtttatatcaaaaggaataaagatcaaaattatggcatttatgtcccagcaaattggggagggtttttttttgtttttttgtttgttttttgttttatttttgttttttgttttttgtttttttgagacagggtctggctctgtcgcccaggctggaggtcagtggcgcgatctcggctcactgcaagctccacctcccgggttcacgccattctcctgcctcagcctcccgagtagctgggaccacaggcgcccgccactatgcccagctaattttctgcatttttagtagagagggggtttcaccgtgttagccaggatggtcttgatctcctgacctcaagatccacccgcctcggcctcccaaagtgttgggattacaggcgtgagccaccgcgcccagctggggaggtttttgagggtagggggcatacttaagtttacaaaatccactgacgccagtggaatacgggatgccagcacagtgggaaaagacagcctgatctctgggacagccccagtttcagcacttaaaagacactgcactgcctttctggctgccacaggacagaaccccccgcctccctccagcctttcccacaccacaaaacaagcatctaatattttccagggaccttccagggacaacacaaacttccctttgtccaacagaattgaagggtgaagggaccagagactgaggactggattttctactcccaggaactccttgatggagctctgagatgctgaattttttaaagagtttctgttattaaaggattttagatattaagttgtaacatacagtcatgcaccacatagacatctcagtcagcaatggactcccatagacgatggtggacccgtgagatgataatggagctgaaaaattcctgttgcctactcatgttgcctagtgacatcatagcctttgcaacccatcaccctttctatgtttagctacgcttagatgcacaaacccttatcattgtgttacaattgcctgaacagaacagtcacatgctgtacaggcttgtagcctcggagcaataggctggaccatatagcctaggtgtgtagcaggctatgccatccaggtttgtgtgagtacactctgatgtttgcacaacgatgaaatcgcataacaacgcatttctcagaatgtgtcccagttgttaagcaacacatgaacatgactgtatttaatattgtttatagcagaaagttagagtttgggatttgtcttttgaattctagttatgtagctctcttagcaattctaagactctgccactagggtcatcaccctccctcacaacccctctcaccatgacctcaacccccatcctggccccctcttgccttctctgcattctatatttacttagaagatccttgcttgttcatgagttgagattgtcagggggacatgccctccgcaatgtaatgagtgtttaaacaacagtcaggcctttgaaccccaggctccagttaaaaagtaacaggctagatactgaatcaataggaggcaaatattagctacggaggctgagagagaccgagttgggaaacacttgttgctggtgacatgcaaagagcaatggccatacccacctgaggtccaggaagccctgggagccccatgaccttcggcctgtcattgtcctgctctacatgttgtaacattgaagccaccagcccttaattagcttctagacctccctcagtctggacttctgcaatatcccactaaatggtgtccacctgatttttccccttcccagccatcttacactcatgtgagcctgcttccagcaaactctgatcttgtcaatcttctgctggaaaattttccatgactccccattgcattcctgactggtgcgcaagggcatctacctgctctttgggacgtgggcagggggatggcagatctccaggtggtcacatctaaccaccaattcccagtcttctttctcccccgtagtgtgctgccttcagtgttatcgatgatttcttctgtcttgatactgtgtctttggtttccatgacatttcaatcttctggttactctctcactcttcaaatactcctactattttttctcctctcctaaaggtaggtgttccccaataatttgttcttggtgagctctctctctctctctctctctgtgtctctttctccttttcctcctcctcttcctctcatggcttaagttagtacctccatgtggacaattcccaagtgtatctctagccccagcttctctcagggccctcgtctccaaaagcctaatggactcatcgtaggacattcctcaagtcacccaaactctaaatgtcccaatctgaactcacacttttaaacctctcctcctccgtatttccaaatctctgggagttgttctcttgtatcttccaggcatccacactggaacttcctcagtgacctttcacatggttttgctccctaggttgaaagagtgacaaagttcagttttctattcatgcattcactcattcattcaacaaatatgcattgagtgcctgccatgtaccaagcactcgtaggggttaggaatacagcaattaaaacaaaacaaaagaaagatcacttccatcatgagatatttatatgtttctcatttagttgcctccactagaaatatgtttctcatttagttgtctccactagaatatgtaagtacaatatatggtgtgttaaatgttgatgaagccaggggaaaaaataaagcagacgaaggatccaggtagtatgggagggtgcaattttggatggggtgagtcagggtaaagagcaccaggaggtgagtgagcaagccatgaggctttgggcagagaaacagcaaatccagaggtcttaaggaggaacaggaaacaagatagagcccctttgggactataccaaggtgagccatctgttagccaagtgaagggtcaagtagaaagtggaaggatcatggatgtcaaggaggtccaggctggagctaaagcatcatcagcgtgtatatggtctttaaagctgtggcactgaaaaggaggggtccaaggacaggagcatgagatggatccaggaaaggaggagtggccagagaggtgacaggaaaaccaagagacagtggtgaccctggagaaatttggctgggaggagagagtttatttatgaaggacagaccaagcgtggtatggcctgctggtaggtcagcaagatgaggactgagaagcgacaactggaattatcaatgtggatgtcattggtggccttaataggagagattttgctggaatttgggggcaaatgcccccaaaagaaggggaagaggaactggagacagggacacccatcacagctcaggcatctggattcttaccttcatttccaccccctctccaccttgcttgcctctgtaactgctgcccaagttatgacaataatgtcctgactgtacctcccacttgttcccttcccagttcccagtccagtttgcactggtgcagcccaactccaatatctacattctcttgcagaaacccttcaaaggcttgcctgtattgaccaatgaaaatgaaactaaaatctacactccttatgagcaagggcattcaaggtcaggctcataactcaccttttctctacgctcctatagtcacatcaagggaaccgttccatccccatgcagcccttgcattgctaccttctcgcctgtgctcccaccactctctctactcagagtgaccttcccatatatccaaatctagccaaccttcagggcccatctcaaatgtcacctcctccatgaagccctgcctgattcacctcaccaaatgaagttccaaccctcctctgagtttacagcactttgtccctttctgtctcttattgtggttattagtatggctatctccatcctatacatcacccgaagcacctgaaagcgtggggctaaatcaatgctctctgtaccttggatgctcaataaaactgccttacagtaaactagatggtgctggggaatggggatggggtggtgtttctggctatagggaggtttgggattgtctgtagatttctgtttgcggatctttgctgtttcctgcctgtgtgtgttcctgaataaacagtcagacactggccaggctgccgaggattgcccacctcacaaccctgacagaggggccgggttgactacaagacagtcatttggggctgggagtctgaaggagaccgagttgggaaacacttgctgctggtgacatgcaaagagcaacggccatacccacctggagtccaggaagccctgggagccccatgaccttgggcctgtcattgtcgtgctctacaggtgattacagaggctcacacctgtaatcccagcactttgggaggccaaggtgggagtatcacctgagcccaggagttcaagaccagcctgggcaacatagtgagaccccctcaaatctctacaaaaaaattttgaaaactaacagattagccaggcatggtggtacttgcttgtagtcccagttattccagaggctgaggcaggaggattgctcaagcccagaagttggaggctgcagtgggccatgatctcaccactgcactccagctgagggacagagcacgaccttgtttctaaaaacaaaagtcaggtagagtctctgacaagagtgcaaaaggggaggcaacgtgacagtcgtgaagacactgaaactgcaggaaatgatctgagacagtcacgctgccttggcctgagtgttttggtgcctgtcggctctccgacattggaaaggtttcctgaaaagtagcaaatgaatgagctgccttttttgctctgcctctcatacttacagacacaatttccaagcctcctggtctcagcaaaaatttagttctccagagatgccagtttccctggaggcctccaggtatccgagccacacttggctgtccgtgcagaggtgcctggcaaatgactcctggtggctgcttagcgatctttaggttttcactgaggatacgattaagggacctagtgtttgggaaaggaggcagccctggagg

SEQ ID NO: 103 - DNA, 8218 bp, Homo sapiens
gggcactgctttaaaactgggaaggaggaagacgaggccagggagccggagggtcaccaaggtagatttccagcagcgctagtccagctgaacactttccagccttgtttttcagcagctttgaggaaaagtatagtgatccgtatgtgaaactttcattgtacgtagcggatgagaatagagaacttgctttggtccagacaaaaacaattaaaaagacactgaacccaaaatggaatgaagaattttatttcagggtaaacccatctaatcacagactcctatttgaagtatttgacgaaaatagactgacacgagacgacttcctgggccaggtggacgtgccccttagtcaccttccgacagaagatccaaccatggagcgaccctatacatttaaggactttctcctcagaccaagaagtcataagtctcgagttaagggatttttgcgattgaaaatggcctatatgccaaaaaatggaggtcaagatgaagaaaacagtgaccagagggatgacatggagcatggatgggaagttgttgactcaaatgactcggcttctcagcaccaagaggaacttcctcctcctcctctgcctcccgggtgggaagaaaaagtggacaatttaggccgaacttactatgtcaaccacaacaaccggaccactcagtggcacagaccaagcctgatggacgtgtcctcggagtcggacaataacatcagacagatcaaccaggaggcagcacaccggcgcttccgctcccgcaggcacatcagcgaagacttggagcccgagccctcggagggcggggatgtccccgagccttgggagaccatttcagaggaagtgaatatcgctggagactctctcggtctggctctgcccccaccaccggcctccccaggatctcggaccagccctcaggagctgtcagaggaactaagcagaaggcttcagatcactccagactccaatggggaacagttcagctctttgattcaaagagaaccctcctcaaggttgaggtcatgcagtgtcaccgacgcagttgcagaacagggccatctaccaccgcccagtgccccagctgggagagcgcgttcatcaactgtcacgggtggtgaggaaccaacgccatcagtggcctatgtacataccacgccgggtctgccttcaggctgggaagaaagaaaagatgctaaggggcgcacatactatgtcaatcataacaatcgaaccacaacttggactcgacctatcatgcagcttgcagaagatggtgcgtccggatcagccacaaacagtaacaaccatctaatcgagcctcagatccgccggcctcgtagcctcagctcgccaacagtaactttatctgccccgctggagggtgccaaggactcacccgtacgtcgggctgtgaaagacaccctttccaacccacagtccccacagccatcaccttacaactcccccaaaccacaacacaaagtcacacagagcttcttgccacccggctgggaaatgaggatagcgccaaacggccggcccttcttcattgatcataacacaaagactacaacctgggaagatccacgtttgaaatttccagtacatatgcggtcaaagacatctttaaaccccaatgaccttggcccccttcctcctggctgggaagaaagaattcacttggatggccgaacgttttatattgatcataatagcaaaattactcagtgggaagacccaagactgcagaacccagctattactggtccggctgtcccttactccagagaatttaagcagaaatatgactacttcaggaagaaattaaagaaacctgctgatatccccaataggtttgaaatgaaacttcacagaaataacatatttgaagagtcctatcggagaattatgtccgtgaaaagaccagatgtcctaaaagctagactgtggattgagtttgaatcagagaaaggtcttgactatgggggtgtggccagagaatggttcttcttactgtccaaagagatgttcaacccctactacggcctctttgagtactctgccacggacaactacacccttcagatcaaccctaattcaggcctctgtaatgaggatcatttgtcctacttcacttttattggaagagttgctggtctggccgtatttcatgggaagctcttagatggtttcttcattagaccattttacaagatgatgttgggaaagcagataaccctgaatgacatggaatctgtggatagtgaatattacaactctttgaaatggatcctggagaatgaccctactgagctggacctcatgttctgcatagacgaagaaaactttggacagacatatcaagtggatttgaagcccaatgggtcagaaataatggtcacaaatgaaaacaaaagggaatatatcgacttagtcatccagtggagatttgtgaacagggtccagaagcagatgaacgccttcttggagggattcacagaactacttcctattgatttgattaaaatttttgatgaaaatgagctggagttgctcatgtgcggcctcggtgatgtggatgtgaatgactggagacagcattctatttacaagaacggctactgcccaaaccaccccgtcattcagtggttctggaaggctgtgctactcatggacgccgaaaagcgtatccggttactgcagtttgtcacagggacatcgcgagtacctatgaatggatttgccgaactttatggttccaatggtcctcagctgtttacaatagagcaatggggcagtcctgagaaactgcccagagctcacacatgctttaatcgccttgacttacctccatatgaaacctttgaagatttacgagagaaacttctcatggccgtggaaaatgctcaaggatttgaaggggtggattaagcaccctgtgcctcgggggtggttgttcttcaagcaagttctgcttgcacttttgcatttgcctaacagacttttgcagaggcgatggcagagagcagctgcaggcatggtccctggagccgagccttcaccacgcactcgtccaagttcggatgcgggaacctggtcccagcttgagttcctgcctttcccaccacaaattatcaactggttgatgtgtacactaattacatttcaggaggacttaatgctatttatgttgtgcctctgcaggcaaagcccttaataaatattttacatcctttctaatgacaatgaatggaattaatcactcaacaggtatagtattacgactcatgtttactttttaaaatgatttagaccgattttcagattttatttcgttatgattaaagatgtctcatgtacttggaaaagtgagcatttttttttttttttgtatttcactttcataccaggcttaatgtcaatgacatttttatttttgaagtactctgacacctccaccctctactttattagaattggaaggcaaatttttgtccaaaaacctacagacaagtactttgagagaatttccaatataatattagacataatgataattttttccatactcagaatgaaaaactggatattacgtttttgttttggggtttttttgtacaaatttagctaatagctacaggctgagagaattgtaacatagcatgacaaattttgtgttgacttgaaaggaatcacaccattattccttagaagtaattacatgtgttctaacacatttgagacagggttggactcccatttctcatccgagaaattacttaacccttcctggcgctgtacagtcatcttttattctatttcctctttgctgtttgtagtagagacattttgaatgaaacttggcactgcttgattcaaaactgtggaaaccagatctgtttagtctcctgtttgtatgcgtttgctaatggtagctaaataaccagtttttgttgtaaatgcaccaattctgaaggcactttatgtactacatggaggtcatatctggttttgtttttatttttttatcatgaacattaaatgtgatgatgatttcttttccctgcacacatctttccggtgcaatatctatcaattgtgaatctggctgctggtgtataaaaacctggatgtaaagctgagcctacagacctgtcctcaccaactgttttgtgatttctactcaactacaaagatttatttaatgtactcttaatctaactgagttttgttaccaatgacctgttgcatgcttcaataccgtgtactgcctgagttgtgcctcttgtgtgctagattaaaagtgagacagagacttgacttgatcctctgagctcaagctattgagctggtagtggcagaggactgagggtacctgcacagtttgattcttttccacgtgtaagtctccattgcagaattgtcgtgctttgagaaaacacctgaggcagtgtgggagttgaacgaccctgctgtcctttttaacctgtgttgtcctagaccctgtcggggcagtcaggggacactagagatttgatctcatgcgagtcatcaataggacaaaaaagttgtggtttggggaggtctgtttgttacataaaaaggacctttcggtgtaagaaattgccgtttttaccctgccctggctggcatgtgagaagccatggaaggttgtggttgtaaatgagttgtctaaaggggtgcagaggcctgaggtttctaaaagaaggtagatttctacagagctgagtgttggttcctttttcttattggttgaaaattacctggtagtgatcagaaaacttagatgctatgtaactaaaaaaaaaaaaaaaaaaaaaaaaaaaaaaaaaaaaattcccgctcatgagttttgactattggtgagatgttttccgctacagttaacatgacaaatgtctcagtggcaaaaatcccctttttgtaagcccccatagtctagaggcagttttctttttaagaatcatgccagagcctgagtcgagcagtatgctttcttggtttttgagagtaattgtgtaattgtagagggagaaatccaattctaacctaagaactgggattcttctgtcatcttgtaaaccgtatattgaaaaaaacagaatgtcactaaatgcatattaagtcaagtattggaaagtataaaagaaaaatcattctgacaatttctaagccagaagcaaacaagaattactgaaatctaccccatgaatacttggaaggcagtaattgtgagtgacacctcagttcatcaaccccttaataatatcagcttaattttaatgacaactaaatatgctgaagtgaggatttagtattttttaaaaaagcaaaacaaggttcagtagtcctcagcaattctccaagtttctctctttgcctaaaatggtcatagatcttgatttctctgaatcgtgatgaccacacccagtcatcttcacagcataattgcaggtggcagtaaagagagtgtgctgggtaaggagcagttgctgggtcattccttgggccccgacctgcccggggagtagccctgggggagagagggcagtgttgcctatcccagaggtcccagcagtcacactgctctgcaggccgggctctctttatagccagagaaatcaccttaatgcagtctctttagttgtctgctgaagctgtagttattatgggccacttacatgaggctgagaagtacgtgccggagctcacacactgcctgttgcggttctcttaacatcagttatcacagctgcctgtgggtcccgggtatttccattcctgccccttgttggcccgaggaaggatgtggaaagagcacctggtgggatgaaggtccaacagcctgtgcctctccactgctggccctggagccggcagcagtgaggcattcattgtctgtgttgcggtgtattcccagcttcagtgctcttttcctttttgcctgaaatgtttatgcttctctgcagccagtcctctaacaaatctcaagaacaaaggtaagacacttggtttttgtttccaggacccttcagaaggtgacatcagatattccctaaattcagacaatgagggatacagagcgacttggcatgtattatttctcccatgtaaggacaaagggacagattattattgttatttctgagacagagtcttgctctgtagctcaggctggagtgcagtggctcaatctcagctcaccacaacctctgcctcctggcttcaagcgattcttctgcctcagcctccccgaatagttgggattacaggcacccaccaccacgcctggctaatttttgtatttttagtagagatggtttcaccatgctggccaggctggtcttgaactcctgacctcaggtgatcctcccgcctcagccttccaaagtgctgggattacaagcatgagccaccgcacccggcctcacagtgacagattctgagaaacagcatgcaaaacatttgaaccattttctacatctcccattgttgcatagagagtgtgcaccgctgctatcttgccagatccacactggtcctcccgaaagccaggttcatacacagcaactttttaattattctaacagttacccattaacagtcgactcctgtatttctgagagtcttgtactcacctctgaaatttaaaaacgtataaagagagcctgggttaatcagttctgcagcccctacgtgacactgtgctagttctccttcttctgtctcctccttaccctggccctgcacccctgtacttaagagggagaggtgggaggtgctgtctggtatcatttgctgcctcgccagtagagggtgccgctgtgcagggtaactgcccgcctgctcccttcctgacctcccctgaccccgaagatcactacctctgtcattcaggcattggggtacatcctgataagtcgtgtcagaactgccaatttcaggactgagatgtgtttttaaaaaacaaatccttataaactccactttgtactttagattttaaaactggggaaaaatgtgatattctttggaccacttttttaatttatataagccttaatgaacagtgtctatacatttgcatacacacacccccaccccagagtgttctcagtatgtcagagaaagtgccacagcattaggacgggagcttggagaacgttttctagaaaagggttagcttcctgttggcatgaaattttccaagcaaacctcattaaacatctgttgtttgttaaagatgttccactgaaagcaacgcatgtttcaaaggcacgtctttccgttcgttggttttctgtgtgtaaggagtagcattgctgttggcgcctaacctcgcgtgcactgcattctcaaccccgtaccagtgcatcatcagaagccttcctcgtgaccataactctgtgtctgcagatatgtgttcccgtgtaagccagttttccccttttactcagactgatttcacctagattgtcacggtttccttcatgttaactttgcgtgactttgttcttcctttactactctgtatgtaatatatatacatatatacgtacatatgctgtccaaatatatttgtatatatttgtatagcatttttacacctttattgagtaatctggtttcgaaaggaggtgagagtttagtcccttctgcagttttctccaagctgtgtcctgtgaatttcaacccttggagcctaagaaaaccctaggaagatgatgttaatttgctgtcatttcctaattcaggatctatcatcaaatgaaacatgaaaaaaacagtgacttttaaggtgaaaagagtttcaagcattccaaataaattatcaatgtttcataactttttattataaacccacctcctaataggaagccaagtactatttgatacagtggtaaaaaccaaactaccttgaatttttttaaggcaacttatgaataatgctcattttcacagtcagaatagctttaaaatatggttgaatttgatacacacaggaagttttcttgaagaacaatcctttcgcttttcttttttcttgagagatctaaagagaaactgtagattgttttcctgacagcaaaagactaatgtgacaaaatgaagtcattgtaaagaagcgatgcaacttgtcaaatatttaataaagaattatggaagctggaacattttctacatca

SEQ ID NO: 104 - protein, 948 aa, Homo sapiens
ISSSDAEHFPALFFSSFEEKYSDPYVKLSLYVADENRELALVQTKTIKKTLNPKWNEEFYFRVNPSNHRLLFEVFDENRLTRDDFLGQVDVPLSHLPTEDPTMERPYTFKDFLLRPRSHKSRVKGFLRLKMAYMPKNGGQDEENSDQRDDMEHGWEVVDSNDSASQHQEELPPPPLPPGWEEKVDNLGRTYYVNHNNRTTQWHRPSLMDVSSESDNNIRQINQEAAHRRFRSRRHEDLEPEPSEGGDVPEPWETISEEVNIAGDSLGLALPPPPDGSRTSPQELSEELSRRLQITPDSNGEQFSSLIQREPSSRLRSCSVTDAVAEQGHLPPPSAPAGRARSSTVTGGEEPTPSVAYVHTTPGLPSGWEERKDAKGRTYYVNHNNRTTTWWIMQLAEDGASGSATNSNNHLIEPQIRRPRSLSSPTVTLSAPLEGAKDSPVRRAVKDTLSNPQSPQPSPYNSPKPQHKVTQSFLPPGWEMRIAPNGRPFFIDHNTKTTTWEDPRLKFPVHMRSKTSLNPNDLGPLPPGWEERIHLDGRTFYIDHNSKITQWEDPRLQNPAITGPAVPYSREFKQKYDYFRKKLKKPADIPNRFEMKLHRNNIFEESYRRIMSVKRPDVLKARLWIEFESEKGLDYGGVAREWFFLLSKEMFNPYYGLFEYSATDNYTLQINPNSGLCNEDHLSYFTFIGRVAGLAVFHGKLLDGFFIRPFYKMMLGKQITLNDMESVDSEYYNSLKWINDPTELDLMFCIDEENFGQTYQVDLKPNGSEIMVTNENKREYIDLVIQWRFVNRVQKQMNAFLEGFTELLPIDLIKIFDENELELLMCGLGDVDVNDWRQHSIYKNGYCPNHPVIQWFWKAVLLMDAEKRIRLLQFVTGTSRVPMNGFAELYGSNGPQLFTIEQWGSPEKLPRAHTCFNRLDLPPYETFEDLREKLLMAVENAQGFEGVD

SEQ ID NO: 105 - DNA, 8348 bp, Homo sapiens
ccagtcacagaggaagccatttccagagaggaacaaccgtgtagactgctttcctgggagtcaagttaaaacttctctcctgtgaccttgtcacccggcagtggaaagttacccttggctgcagccacgacttccgcatactcttcagaacttgctctgcccttgagttttccagctttcctttaatgcactaaacctttaatattgtattctcctaaatgagacgtctcgcatttgagcaggtaacactcgggagagtcccgtattctcagagtaaaagttgtttctggaattgatctcgccaaaaaggacatctttggagccagtgatccgtatgtgaaactttcattgtacgtagcggatgagaatagagaacttgctttggtccagacaaaaacaattaaaaagacactgaacccaaaatggaatgaagaattttatttcagggtaaacccatctaatcacagactcctatttgaagtatttgacgaaaatagactgacacgagacgacttcctgggccaggtggacgtgccccttagtcaccttccgacagaagatccaaccatggagcgaccctatacatttaaggactttctcctcagaccaagaagtcataagtctcgagttaagggatttttgcgattgaaaatggcctatatgccaaaaaatggaggtcaagatgaagaaaacagtgaccagagggatgacatggagcatggatgggaagttgttgactcaaatgactcggcttctcagcaccaagaggaacttcctcctcctcctctgcctcccgggtgggaagaaaaagtggacaatttaggccgaacttactatgtcaaccacaacaaccggaccactcagtggcacagaccaagcctgatggacgtgtcctcggagtcggacaataacatcagacagatcaaccaggaggcagcacaccggcgcttccgctcccgcaggcacatcagcgaagacttggagcccgagccctcggagggcggggatgtccccgagccttgggagaccatttcagaggaagtgaatatcgctggagactctctcggtctggctctgcccccaccaccggcctccccaggatctcggaccagccctcaggagctgtcagaggaactaagcagaaggcttcagatcactccagactccaatggggaacagttcagctctttgattcaaagagaaccctcctcaaggttgaggtcatgcagtgtcaccgacgcagttgcagaacagggccatctaccaccgccatcagtggcctatgtacataccacgccgggtctgccttcaggctgggaagaaagaaaagatgctaaggggcgcacatactatgtcaatcataacaatcgaaccacaacttggactcgacctatcatgcagcttgcagaagatggtgcgtccggatcagccacaaacagtaacaaccatctaatcgagcctcagatccgccggcctcgtagcctcagctcgccaacagtaactttatctgccccgctggagggtgccaaggactcacccgtacgtcgggctgtgaaagacaccctttccaacccacagtccccacagccatcaccttacaactcccccaaaccacaacacaaagtcacacagagcttcttgccacccggctgggaaatgaggatagcgccaaacggccggcccttcttcattgatcataacacaaagactacaacctgggaagatccacgtttgaaatttccagtacatatgcggtcaaagacatctttaaaccccaatgaccttggcccccttcctcctggctgggaagaaagaattcacttggatggccgaacgttttatattgatcataatagcaaaattactcagtgggaagacccaagactgcagaacccagctattactggtccggctgtcccttactccagagaatttaagcagaaatatgactacttcaggaagaaattaaagaaacctgctgatatccccaataggtttgaaatgaaacttcacagaaataacatatttgaagagtcctatcggagaattatgtccgtgaaaagaccagatgtcctaaaagctagactgtggattgagtttgaatcagagaaaggtcttgactatgggggtgtggccagagaatggttcttcttactgtccaaagagatgttcaacccctactacggcctctttgagtactctgccacggacaactacacccttcagatcaaccctaattcaggcctctgtaatgaggatcatttgtcctacttcacttttattggaagagttgctggtctggccgtatttcatgggaagctcttagatggtttcttcattagaccattttacaagatgatgttgggaaagcagataaccctgaatgacatggaatctgtggatagtgaatattacaactctttgaaatggatcctggagaatgaccctactgagctggacctcatgttctgcatagacgaagaaaactttggacagacatatcaagtggatttgaagcccaatgggtcagaaataatggtcacaaatgaaaacaaaagggaatatatcgacttagtcatccagtggagatttgtgaacagggtccagaagcagatgaacgccttcttggagggattcacagaactacttcctattgatttgattaaaatttttgatgaaaatgagctggagttgctcatgtgcggcctcggtgatgtggatgtgaatgactggagacagcattctatttacaagaacggctactgcccaaaccaccccgtcattcagtggttctggaaggctgtgctactcatggacgccgaaaagcgtatccggttactgcagtttgtcacagggacatcgcgagtacctatgaatggatttgccgaactttatggttccaatggtcctcagctgtttacaatagagcaatggggcagtcctgagaaactgcccagagctcacacatgctttaatcgccttgacttacctccatatgaaacctttgaagatttacgagagaaacttctcatggccgtggaaaatgctcaaggatttgaaggggtggattaagcaccctgtgcctcgggggtggttgttcttcaagcaagttctgcttgcacttttgcatttgcctaacagacttttgcagaggcgatggcagagagcagctgcaggcatggtccctggagccgagccttcaccacgcactcgtccaagttcggatgcgggaacctggtcccagcttgagttcctgcctttcccaccacaaattatcaactggttgatgtgtacactaattacatttcaggaggacttaatgctatttatgttgtgcctctgcaggcaaagcccttaataaatattttacatcctttctaatgacaatgaatggaattaatcactcaacaggtatagtattacgactcatgtttactttttaaaatgatttagaccgattttcagattttatttcgttatgattaaagatgtctcatgtacttggaaaagtgagcatttttttttttttttgtatttcactttcataccaggcttaatgtcaatgacatttttatttttgaagtactctgacacctccaccctctactttattagaattggaaggcaaatttttgtccaaaaacctacagacaagtactttgagagaatttccaatataatattagacataatgataattttttccatactcagaatgaaaaactggatattacgtttttgttttggggtttttttgtacaaatttagctaatagctacaggctgagagaattgtaacatagcatgacaaattttgtgttgacttgaaaggaatcacaccattattccttagaagtaattacatgtgttctaacacatttgagacagggttggactcccatttctcatccgagaaattacttaacccttcctggcgctgtacagtcatcttttattctatttcctctttgctgtttgtagtagagacattttgaatgaaacttggcactgcttgattcaaaactgtggaaaccagatctgtttagtctcctgtttgtatgcgtttgctaatggtagctaaataaccagtttttgttgtaaatgcaccaattctgaaggcactttatgtactacatggaggtcatatctggttttgtttttatttttttatcatgaacattaaatgtgatgatgatttcttttccctgcacacatctttccggtgcaatatctatcaattgtgaatctggctgctggtgtataaaaacctggatgtaaagctgagcctacagacctgtcctcaccaactgttttgtgatttctactcaactacaaagatttatttaatgtactcttaatctaactgagttttgttaccaatgacctgttgcatgcttcaataccgtgtactgcctgagttgtgcctcttgtgtgctagattaaaagtgagacagagacttgacttgatcctctgagctcaagctattgagctggtagtggcagaggactgagggtacctgcacagtttgattcttttccacgtgtaagtctccattgcagaattgtcgtgctttgagaaaacacctgaggcagtgtgggagttgaacgaccctgctgtcctttttaacctgtgttgtcctagaccctgtcggggcagtcaggggacactagagatttgatctcatgcgagtcatcaataggacaaaaaagttgtggtttggggaggtctgtttgttacataaaaaggacctttcggtgtaagaaattgccgtttttaccctgccctggctggcatgtgagaagccatggaaggttgtggttgtaaatgagttgtctaaaggggtgcagaggcctgaggtttctaaaagaaggtagatttctacagagctgagtgttggttcctttttcttattggttgaaaattacctggtagtgatcagaaaacttagatgctatgtaactaaaaaaaaaaaaaaaaaaaaaaaaaaaaaaaaaaaaattcccgctcatgagttttgactattggtgagatgttttccgctacagttaacatgacaaatgtctcagtggcaaaaatcccctttttgtaagcccccatagtctagaggcagttttctttttaagaatcatgccagagcctgagtcgagcagtatgctttcttggtttttgagagtaattgtgtaattgtagagggagaaatccaattctaacctaagaactgggattcttctgtcatcttgtaaaccgtatattgaaaaaaacagaatgtcactaaatgcatattaagtcaagtattggaaagtataaaagaaaaatcattctgacaatttctaagccagaagcaaacaagaattactgaaatctaccccatgaatacttggaaggcagtaattgtgagtgacacctcagttcatcaaccccttaataatatcagcttaattttaatgacaactaaatatgctgaagtgaggatttagtattttttaaaaaagcaaaacaaggttcagtagtcctcagcaattctccaagtttctctctttgcctaaaatggtcatagatcttgatttctctgaatcgtgatgaccacacccagtcatcttcacagcataattgcaggtggcagtaaagagagtgtgctgggtaaggagcagttgctgggtcattccttgggccccgacctgcccggggagtagccctgggggagagagggcagtgttgcctatcccagaggtcccagcagtcacactgctctgcaggccgggctctctttatagccagagaaatcaccttaatgcagtctctttagttgtctgctgaagctgtagttattatgggccacttacatgaggctgagaagtacgtgccggagctcacacactgcctgttgcggttctcttaacatcagttatcacagctgcctgtgggtcccgggtatttccattcctgccccttgttggcccgaggaaggatgtggaaagagcacctggtgggatgaaggtccaacagcctgtgcctctccactgctggccctggagccggcagcagtgaggcattcattgtctgtgttgcggtgtattcccagcttcagtgctcttttcctttttgcctgaaatgtttatgcttctctgcagccagtcctctaacaaatctcaagaacaaaggtaagacacttggtttttgtttccaggacccttcagaaggtgacatcagatattccctaaattcagacaatgagggatacagagcgacttggcatgtattatttctcccatgtaaggacaaagggacagattattattgttatttctgagacagagtcttgctctgtagctcaggctggagtgcagtggctcaatctcagctcaccacaacctctgcctcctggcttcaagcgattcttctgcctcagcctccccgaatagttgggattacaggcacccaccaccacgcctggctaatttttgtatttttagtagagatggtttcaccatgctggccaggctggtcttgaactcctgacctcaggtgatcctcccgcctcagccttccaaagtgctgggattacaagcatgagccaccgcacccggcctcacagtgacagattctgagaaacagcatgcaaaacatttgaaccattttctacatctcccattgttgcatagagagtgtgcaccgctgctatcttgccagatccacactggtcctcccgaaagccaggttcatacacagcaactttttaattattctaacagttacccattaacagtcgactcctgtatttctgagagtcttgtactcacctctgaaatttaaaaacgtataaagagagcctgggttaatcagttctgcagcccctacgtgacactgtgctagttctccttcttctgtctcctccttaccctggccctgcacccctgtacttaagagggagaggtgggaggtgctgtctggtatcatttgctgcctcgccagtagagggtgccgctgtgcagggtaactgcccgcctgctcccttcctgacctcccctgaccccgaagatcactacctctgtcattcaggcattggggtacatcctgataagtcgtgtcagaactgccaatttcaggactgagatgtgtttttaaaaaacaaatccttataaactccactttgtactttagattttaaaactggggaaaaatgtgatattctttggaccacttttttaatttatataagccttaatgaacagtgtctatacatttgcatacacacacccccaccccagagtgttctcagtatgtcagagaaagtgccacagcattaggacgggagcttggagaacgttttctagaaaagggttagcttcctgttggcatgaaattttccaagcaaacctcattaaacatctgttgtttgttaaagatgttccactgaaagcaacgcatgtttcaaaggcacgtctttccgttcgttggttttctgtgtgtaaggagtagcattgctgttggcgcctaacctcgcgtgcactgcattctcaaccccgtaccagtgcatcatcagaagccttcctcgtgaccataactctgtgtctgcagatatgtgttcccgtgtaagccagttttccccttttactcagactgatttcacctagattgtcacggtttccttcatgttaactttgcgtgactttgttcttcctttactactctgtatgtaatatatatacatatatacgtacatatgctgtccaaatatatttgtatatatttgtatagcatttttacacctttattgagtaatctggtttcgaaaggaggtgagagtttagtcccttctgcagttttctccaagctgtgtcctgtgaatttcaacccttggagcctaagaaaaccctaggaagatgatgttaatttgctgtcatttcctaattcaggatctatcatcaaatgaaacatgaaaaaaacagtgacttttaaggtgaaaagagtttcaagcattccaaataaattatcaatgtttcataactttttattataaacccacctcctaataggaagccaagtactatttgatacagtggtaaaaaccaaactaccttgaatttttttaaggcaacttatgaataatgctcattttcacagtcagaatagctttaaaatatggttgaatttgatacacacaggaagttttcttgaagaacaatcctttcgcttttcttttttcttgagagatctaaagagaaactgtagattgttttcctgacagcaaaagactaatgtgacaaaatgaagtcattgtaaagaagcgatgcaacttgtcaaatatttaataaagaattatggaagctggaacattttctacatca

SEQ ID NO: 106 - protein, 933 aa, Homo sapiens
HSGESRILRVKVVSGIDLAKKDIFGASDPYVKLSLYVADENRELALVQTKTIKKTLNPKWNEEFYFRVNPSNHRLLFEVFDENRLTRDDFLGQVDVPLSHLPTEDPTMERPYTFKDFLLRPRSHKSRVKGFLRLKMAYMPKNGGQDEENSDQRDDMEHGWEVVDSNDSASQHQEELPPPPLPPGWEEKVDNLGRTYYVNHNNRTTQWHRPSLMDVSSESDNNIRQINQEAAHRRFRSRRHEDLEPEPSEGGDVPEPWETISEEVNIAGDSLGLALPPPPDGSRTSPQELSEELSRRLQITPDSNGEQFSSLIQREPSSRLRSCSVTDAVAEQGHLPPPSVAYVHTTPGLPSGWEERKDAKGRTYYVNHNNRTTTWWIMQLAEDGASGSATNSNNHLIEPQIRRPRSLSSPTVTLSAPLEGAKDSPVRRAVKDTLSNPQSPQPSPYNSPKPQHKVTQSFLPPGWEMRIAPNGRPFFIDHNTKTTTWEDPRLKFPVHMRSKTSLNPNDLGPLPPGWEERIHLDGRTFYIDHNSKITQWEDPRLQNPAITGPAVPYSREFKQKYDYFRKKLKKPADIPNRFEMKLHRNNIFEESYRRIMSVKRPDVLKARLWIEFESEKGLDYGGVAREWFFLLSKEMFNPYYGLFEYSATDNYTLQINPNSGLCNEDHLSYFTFIGRVAGLAVFHGKLLDGFFIRPFYKMMLGKQITLNDMESVDSEYYNSLKWINDPTELDLMFCIDEENFGQTYQVDLKPNGSEIMVTNENKREYIDLVIQWRFVNRVQKQMNAFLEGFTELLPIDLIKIFDENELELLMCGLGDVDVNDWRQHSIYKNGYCPNHPVIQWFWKAVLLMDAEKRIRLLQFVTGTSRVPMNGFAELYGSNGPQLFTIEQWGSPEKLPRAHTCFNRLDLPPYETFEDLREKLLMAVENAQGFEGVD

SEQ ID NO: 107 - DNA, 8300 bp, Homo sapiens
ttccaacccagacaggcttaagccgcgcgagggtgcccgggtgggtggctgcgcagggccctacctgggcgggagcggctgcagagccctgtccacgcggtgcctccccagcacggcacctcccactccaggctgttggttacctggccgggagctggcggagaccaggatttctcctcgccgccgttgctgttgttaggggaaacagaccatctgcatctagacctgcctctctctccgctccccacttcagacgagctcttcctgcctggaatctgtgatccgtatgtgaaactttcattgtacgtagcggatgagaatagagaacttgctttggtccagacaaaaacaattaaaaagacactgaacccaaaatggaatgaagaattttatttcagggtaaacccatctaatcacagactcctatttgaagtatttgacgaaaatagactgacacgagacgacttcctgggccaggtggacgtgccccttagtcaccttccgacagaagatccaaccatggagcgaccctatacatttaaggactttctcctcagaccaagaagtcataagtctcgagttaagggatttttgcgattgaaaatggcctatatgccaaaaaatggaggtcaagatgaagaaaacagtgaccagagggatgacatggagcatggatgggaagttgttgactcaaatgactcggcttctcagcaccaagaggaacttcctcctcctcctctgcctcccgggtgggaagaaaaagtggacaatttaggccgaacttactatgtcaaccacaacaaccggaccactcagtggcacagaccaagcctgatggacgtgtcctcggagtcggacaataacatcagacagatcaaccaggaggcagcacaccggcgcttccgctcccgcaggcacatcagcgaagacttggagcccgagccctcggagggcggggatgtccccgagccttgggagaccatttcagaggaagtgaatatcgctggagactctctcggtctggctctgcccccaccaccggcctccccaggatctcggaccagccctcaggagctgtcagaggaactaagcagaaggcttcagatcactccagactccaatggggaacagttcagctctttgattcaaagagaaccctcctcaaggttgaggtcatgcagtgtcaccgacgcagttgcagaacagggccatctaccaccgccatcagtggcctatgtacataccacgccgggtctgccttcaggctgggaagaaagaaaagatgctaaggggcgcacatactatgtcaatcataacaatcgaaccacaacttggactcgacctatcatgcagcttgcagaagatggtgcgtccggatcagccacaaacagtaacaaccatctaatcgagcctcagatccgccggcctcgtagcctcagctcgccaacagtaactttatctgccccgctggagggtgccaaggactcacccgtacgtcgggctgtgaaagacaccctttccaacccacagtccccacagccatcaccttacaactcccccaaaccacaacacaaagtcacacagagcttcttgccacccggctgggaaatgaggatagcgccaaacggccggcccttcttcattgatcataacacaaagactacaacctgggaagatccacgtttgaaatttccagtacatatgcggtcaaagacatctttaaaccccaatgaccttggcccccttcctcctggctgggaagaaagaattcacttggatggccgaacgttttatattgatcataatagcaaaattactcagtgggaagacccaagactgcagaacccagctattactggtccggctgtcccttactccagagaatttaagcagaaatatgactacttcaggaagaaattaaagaaacctgctgatatccccaataggtttgaaatgaaacttcacagaaataacatatttgaagagtcctatcggagaattatgtccgtgaaaagaccagatgtcctaaaagctagactgtggattgagtttgaatcagagaaaggtcttgactatgggggtgtggccagagaatggttcttcttactgtccaaagagatgttcaacccctactacggcctctttgagtactctgccacggacaactacacccttcagatcaaccctaattcaggcctctgtaatgaggatcatttgtcctacttcacttttattggaagagttgctggtctggccgtatttcatgggaagctcttagatggtttcttcattagaccattttacaagatgatgttgggaaagcagataaccctgaatgacatggaatctgtggatagtgaatattacaactctttgaaatggatcctggagaatgaccctactgagctggacctcatgttctgcatagacgaagaaaactttggacagacatatcaagtggatttgaagcccaatgggtcagaaataatggtcacaaatgaaaacaaaagggaatatatcgacttagtcatccagtggagatttgtgaacagggtccagaagcagatgaacgccttcttggagggattcacagaactacttcctattgatttgattaaaatttttgatgaaaatgagctggagttgctcatgtgcggcctcggtgatgtggatgtgaatgactggagacagcattctatttacaagaacggctactgcccaaaccaccccgtcattcagtggttctggaaggctgtgctactcatggacgccgaaaagcgtatccggttactgcagtttgtcacagggacatcgcgagtacctatgaatggatttgccgaactttatggttccaatggtcctcagctgtttacaatagagcaatggggcagtcctgagaaactgcccagagctcacacatgctttaatcgccttgacttacctccatatgaaacctttgaagatttacgagagaaacttctcatggccgtggaaaatgctcaaggatttgaaggggtggattaagcaccctgtgcctcgggggtggttgttcttcaagcaagttctgcttgcacttttgcatttgcctaacagacttttgcagaggcgatggcagagagcagctgcaggcatggtccctggagccgagccttcaccacgcactcgtccaagttcggatgcgggaacctggtcccagcttgagttcctgcctttcccaccacaaattatcaactggttgatgtgtacactaattacatttcaggaggacttaatgctatttatgttgtgcctctgcaggcaaagcccttaataaatattttacatcctttctaatgacaatgaatggaattaatcactcaacaggtatagtattacgactcatgtttactttttaaaatgatttagaccgattttcagattttatttcgttatgattaaagatgtctcatgtacttggaaaagtgagcatttttttttttttttgtatttcactttcataccaggcttaatgtcaatgacatttttatttttgaagtactctgacacctccaccctctactttattagaattggaaggcaaatttttgtccaaaaacctacagacaagtactttgagagaatttccaatataatattagacataatgataattttttccatactcagaatgaaaaactggatattacgtttttgttttggggtttttttgtacaaatttagctaatagctacaggctgagagaattgtaacatagcatgacaaattttgtgttgacttgaaaggaatcacaccattattccttagaagtaattacatgtgttctaacacatttgagacagggttggactcccatttctcatccgagaaattacttaacccttcctggcgctgtacagtcatcttttattctatttcctctttgctgtttgtagtagagacattttgaatgaaacttggcactgcttgattcaaaactgtggaaaccagatctgtttagtctcctgtttgtatgcgtttgctaatggtagctaaataaccagtttttgttgtaaatgcaccaattctgaaggcactttatgtactacatggaggtcatatctggttttgtttttatttttttatcatgaacattaaatgtgatgatgatttcttttccctgcacacatctttccggtgcaatatctatcaattgtgaatctggctgctggtgtataaaaacctggatgtaaagctgagcctacagacctgtcctcaccaactgttttgtgatttctactcaactacaaagatttatttaatgtactcttaatctaactgagttttgttaccaatgacctgttgcatgcttcaataccgtgtactgcctgagttgtgcctcttgtgtgctagattaaaagtgagacagagacttgacttgatcctctgagctcaagctattgagctggtagtggcagaggactgagggtacctgcacagtttgattcttttccacgtgtaagtctccattgcagaattgtcgtgctttgagaaaacacctgaggcagtgtgggagttgaacgaccctgctgtcctttttaacctgtgttgtcctagaccctgtcggggcagtcaggggacactagagatttgatctcatgcgagtcatcaataggacaaaaaagttgtggtttggggaggtctgtttgttacataaaaaggacctttcggtgtaagaaattgccgtttttaccctgccctggctggcatgtgagaagccatggaaggttgtggttgtaaatgagttgtctaaaggggtgcagaggcctgaggtttctaaaagaaggtagatttctacagagctgagtgttggttcctttttcttattggttgaaaattacctggtagtgatcagaaaacttagatgctatgtaactaaaaaaaaaaaaaaaaaaaaaaaaaaaaaaaaaaaaattcccgctcatgagttttgactattggtgagatgttttccgctacagttaacatgacaaatgtctcagtggcaaaaatcccctttttgtaagcccccatagtctagaggcagttttctttttaagaatcatgccagagcctgagtcgagcagtatgctttcttggtttttgagagtaattgtgtaattgtagagggagaaatccaattctaacctaagaactgggattcttctgtcatcttgtaaaccgtatattgaaaaaaacagaatgtcactaaatgcatattaagtcaagtattggaaagtataaaagaaaaatcattctgacaatttctaagccagaagcaaacaagaattactgaaatctaccccatgaatacttggaaggcagtaattgtgagtgacacctcagttcatcaaccccttaataatatcagcttaattttaatgacaactaaatatgctgaagtgaggatttagtattttttaaaaaagcaaaacaaggttcagtagtcctcagcaattctccaagtttctctctttgcctaaaatggtcatagatcttgatttctctgaatcgtgatgaccacacccagtcatcttcacagcataattgcaggtggcagtaaagagagtgtgctgggtaaggagcagttgctgggtcattccttgggccccgacctgcccggggagtagccctgggggagagagggcagtgttgcctatcccagaggtcccagcagtcacactgctctgcaggccgggctctctttatagccagagaaatcaccttaatgcagtctctttagttgtctgctgaagctgtagttattatgggccacttacatgaggctgagaagtacgtgccggagctcacacactgcctgttgcggttctcttaacatcagttatcacagctgcctgtgggtcccgggtatttccattcctgccccttgttggcccgaggaaggatgtggaaagagcacctggtgggatgaaggtccaacagcctgtgcctctccactgctggccctggagccggcagcagtgaggcattcattgtctgtgttgcggtgtattcccagcttcagtgctcttttcctttttgcctgaaatgtttatgcttctctgcagccagtcctctaacaaatctcaagaacaaaggtaagacacttggtttttgtttccaggacccttcagaaggtgacatcagatattccctaaattcagacaatgagggatacagagcgacttggcatgtattatttctcccatgtaaggacaaagggacagattattattgttatttctgagacagagtcttgctctgtagctcaggctggagtgcagtggctcaatctcagctcaccacaacctctgcctcctggcttcaagcgattcttctgcctcagcctccccgaatagttgggattacaggcacccaccaccacgcctggctaatttttgtatttttagtagagatggtttcaccatgctggccaggctggtcttgaactcctgacctcaggtgatcctcccgcctcagccttccaaagtgctgggattacaagcatgagccaccgcacccggcctcacagtgacagattctgagaaacagcatgcaaaacatttgaaccattttctacatctcccattgttgcatagagagtgtgcaccgctgctatcttgccagatccacactggtcctcccgaaagccaggttcatacacagcaactttttaattattctaacagttacccattaacagtcgactcctgtatttctgagagtcttgtactcacctctgaaatttaaaaacgtataaagagagcctgggttaatcagttctgcagcccctacgtgacactgtgctagttctccttcttctgtctcctccttaccctggccctgcacccctgtacttaagagggagaggtgggaggtgctgtctggtatcatttgctgcctcgccagtagagggtgccgctgtgcagggtaactgcccgcctgctcccttcctgacctcccctgaccccgaagatcactacctctgtcattcaggcattggggtacatcctgataagtcgtgtcagaactgccaatttcaggactgagatgtgtttttaaaaaacaaatccttataaactccactttgtactttagattttaaaactggggaaaaatgtgatattctttggaccacttttttaatttatataagccttaatgaacagtgtctatacatttgcatacacacacccccaccccagagtgttctcagtatgtcagagaaagtgccacagcattaggacgggagcttggagaacgttttctagaaaagggttagcttcctgttggcatgaaattttccaagcaaacctcattaaacatctgttgtttgttaaagatgttccactgaaagcaacgcatgtttcaaaggcacgtctttccgttcgttggttttctgtgtgtaaggagtagcattgctgttggcgcctaacctcgcgtgcactgcattctcaaccccgtaccagtgcatcatcagaagccttcctcgtgaccataactctgtgtctgcagatatgtgttcccgtgtaagccagttttccccttttactcagactgatttcacctagattgtcacggtttccttcatgttaactttgcgtgactttgttcttcctttactactctgtatgtaatatatatacatatatacgtacatatgctgtccaaatatatttgtatatatttgtatagcatttttacacctttattgagtaatctggtttcgaaaggaggtgagagtttagtcccttctgcagttttctccaagctgtgtcctgtgaatttcaacccttggagcctaagaaaaccctaggaagatgatgttaatttgctgtcatttcctaattcaggatctatcatcaaatgaaacatgaaaaaaacagtgacttttaaggtgaaaagagtttcaagcattccaaataaattatcaatgtttcataactttttattataaacccacctcctaataggaagccaagtactatttgatacagtggtaaaaaccaaactaccttgaatttttttaaggcaacttatgaataatgctcattttcacagtcagaatagctttaaaatatggttgaatttgatacacacaggaagttttcttgaagaacaatcctttcgcttttcttttttcttgagagatctaaagagaaactgtagattgttttcctgacagcaaaagactaatgtgacaaaatgaagtcattgtaaagaagcgatgcaacttgtcaaatatttaataaagaattatggaagctggaacattttctacatca

SEQ ID NO: 108 - protein, 990 aa, Homo sapiens
ARCPGGWLRRALPGRERLQSPVHAVPPQHGTSHSRLLVTWPGAGGDQDFSSPPLLLLGETDHLHLDLPLSPLPTSDELFLPGICDPYVKLSLYVADENRELALVQTKTIKKTLNPKWNEEFYFRVNPSNHRLLFEVFDENRLTRDDFLGQVDVPLSHLPTEDPTMERPYTFKDFLLRPRSHKSRVKGFLRLKMAYMPKNGGQDEENSDQRDDMEHGWEVVDSNDSASQHQEELPPPPLPPGWEEKVDNLGRTYYVNHNNRTTQWHRPSLMDVSSESDNNIRQINQEAAHRRFRSRRHEDLEPEPSEGGDVPEPWETISEEVNIAGDSLGLALPPPPDGSRTSPQELSEELSRRLQITPDSNGEQFSSLIQREPSSRLRSCSVTDAVAEQGHLPPPSVAYVHTTPGLPSGWEERKDAKGRTYYVNHNNRTTTWWIMQLAEDGASGSATNSNNHLIEPQIRRPRSLSSPTVTLSAPLEGAKDSPVRRAVKDTLSNPQSPQPSPYNSPKPQHKVTQSFLPPGWEMRIAPNGRPFFIDHNTKTTTWEDPRLKFPVHMRSKTSLNPNDLGPLPPGWEERIHLDGRTFYIDHNSKITQWEDPRLQNPAITGPAVPYSREFKQKYDYFRKKLKKPADIPNRFEMKLHRNNIFEESYRRIMSVKRPDVLKARLWIEFESEKGLDYGGVAREWFFLLSKEMFNPYYGLFEYSATDNYTLQINPNSGLCNEDHLSYFTFIGRVAGLAVFHGKLLDGFFIRPFYKMMLGKQITLNDMESVDSEYYNSLKWINDPTELDLMFCIDEENFGQTYQVDLKPNGSEIMVTNENKREYIDLVIQWRFVNRVQKQMNAFLEGFTELLPIDLIKIFDENELELLMCGLGDVDVNDWRQHSIYKNGYCPNHPVIQWFWKAVLLMDAEKRIRLLQFVTGTSRVPMNGFAELYGSNGPQLFTIEQWGSPEKLPRAHTCFNRLDLPPYETFEDLREKLLMAVENAQGFEGVD

SEQ ID NO: 109 - DNA, 8064 bp, Homo sapiens
cagtcacagaggaagccatttccagagaggaacaaccgtgtagactgctttcctgggagtcaagttaaaacttctctcctgtgaccttgtcacccggcagtggaaagttacccttggctgcagccacgacttccgcatactcttcagaacttgctctgcccttgagttttccagctttcctttaatgcactaaacctttaatattgtattctcctaaatgagacgtctcgcatttgagcaggtaacactcgggagagtcccgtattctcagagtaaaagttgtttctggaattgatctcgccaaaaaggacatctttggagccaggcggatgagaatagagaacttgctttggtccagacaaaaacaattaaaaagacactgaacccaaaatggaatgaagaattttatttcagggtaaacccatctaatcacagactcctatttgaagtatttgacgaaaatagactgacacgagacgacttcctgggccaggtggacgtgccccttagtcaccttccgacagaagatccaaccatggagcgaccctatacatttaaggactttctcctcagaccaagaagtcataagtctcgagttaagggatttttgcgattgaaaatggcctatatgccaaaaaatggaggtcaagatgaagaaaacagtgaccagagggatgacatggagcatggatgggaagttgttgactcaaatgactcggcttctcagcaccaagaggaacttcctcctcctcctctgcctcccgggtgggaagaaaaagtggacaatttaggccgaacttactatgtcaaccacaacaaccggaccactcagtggcacagaccaagcctgatggacgtgtcctcggagtcggacaataacatcagacagatcaaccaggaggcagcacaccggcgcttccgctcccgcaggcacatcagcgaagacttggagcccgagccctcggagggcggggatgtccccgagccttgggagaccatttcagaggaagtgaatatcgctggagactctctcggtctggctctgcccccaccaccggcctccccaggatctcggaccagccctcaggagctgtcagaggaactaagcagaaggcttcagatcactccagactccaatggggaacagttcagctctttgattcaaagagaaccctcctcaaggttgaggtcatgcagtgtcaccgacgcagttgcagaacagggccatctaccaccgggtgccaaggactcacccgtacgtcgggctgtgaaagacaccctttccaacccacagtccccacagccatcaccttacaactcccccaaaccacaacacaaagtcacacagagcttcttgccacccggctgggaaatgaggatagcgccaaacggccggcccttcttcattgatcataacacaaagactacaacctgggaagatccacgtttgaaatttccagtacatatgcggtcaaagacatctttaaaccccaatgaccttggcccccttcctcctggctgggaagaaagaattcacttggatggccgaacgttttatattgatcataatagcaaaattactcagtgggaagacccaagactgcagaacccagctattactggtccggctgtcccttactccagagaatttaagcagaaatatgactacttcaggaagaaattaaagaaacctgctgatatccccaataggtttgaaatgaaacttcacagaaataacatatttgaagagtcctatcggagaattatgtccgtgaaaagaccagatgtcctaaaagctagactgtggattgagtttgaatcagagaaaggtcttgactatgggggtgtggccagagaatggttcttcttactgtccaaagagatgttcaacccctactacggcctctttgagtactctgccacggacaactacacccttcagatcaaccctaattcaggcctctgtaatgaggatcatttgtcctacttcacttttattggaagagttgctggtctggccgtatttcatgggaagctcttagatggtttcttcattagaccattttacaagatgatgttgggaaagcagataaccctgaatgacatggaatctgtggatagtgaatattacaactctttgaaatggatcctggagaatgaccctactgagctggacctcatgttctgcatagacgaagaaaactttggacagacatatcaagtggatttgaagcccaatgggtcagaaataatggtcacaaatgaaaacaaaagggaatatatcgacttagtcatccagtggagatttgtgaacagggtccagaagcagatgaacgccttcttggagggattcacagaactacttcctattgatttgattaaaatttttgatgaaaatgagctggagttgctcatgtgcggcctcggtgatgtggatgtgaatgactggagacagcattctatttacaagaacggctactgcccaaaccaccccgtcattcagtggttctggaaggctgtgctactcatggacgccgaaaagcgtatccggttactgcagtttgtcacagggacatcgcgagtacctatgaatggatttgccgaactttatggttccaatggtcctcagctgtttacaatagagcaatggggcagtcctgagaaactgcccagagctcacacatgctttaatcgccttgacttacctccatatgaaacctttgaagatttacgagagaaacttctcatggccgtggaaaatgctcaaggatttgaaggggtggattaagcaccctgtgcctcgggggtggttgttcttcaagcaagttctgcttgcacttttgcatttgcctaacagacttttgcagaggcgatggcagagagcagctgcaggcatggtccctggagccgagccttcaccacgcactcgtccaagttcggatgcgggaacctggtcccagcttgagttcctgcctttcccaccacaaattatcaactggttgatgtgtacactaattacatttcaggaggacttaatgctatttatgttgtgcctctgcaggcaaagcccttaataaatattttacatcctttctaatgacaatgaatggaattaatcactcaacaggtatagtattacgactcatgtttactttttaaaatgatttagaccgattttcagattttatttcgttatgattaaagatgtctcatgtacttggaaaagtgagcatttttttttttttttgtatttcactttcataccaggcttaatgtcaatgacatttttatttttgaagtactctgacacctccaccctctactttattagaattggaaggcaaatttttgtccaaaaacctacagacaagtactttgagagaatttccaatataatattagacataatgataattttttccatactcagaatgaaaaactggatattacgtttttgttttggggtttttttgtacaaatttagctaatagctacaggctgagagaattgtaacatagcatgacaaattttgtgttgacttgaaaggaatcacaccattattccttagaagtaattacatgtgttctaacacatttgagacagggttggactcccatttctcatccgagaaattacttaacccttcctggcgctgtacagtcatcttttattctatttcctctttgctgtttgtagtagagacattttgaatgaaacttggcactgcttgattcaaaactgtggaaaccagatctgtttagtctcctgtttgtatgcgtttgctaatggtagctaaataaccagtttttgttgtaaatgcaccaattctgaaggcactttatgtactacatggaggtcatatctggttttgtttttatttttttatcatgaacattaaatgtgatgatgatttcttttccctgcacacatctttccggtgcaatatctatcaattgtgaatctggctgctggtgtataaaaacctggatgtaaagctgagcctacagacctgtcctcaccaactgttttgtgatttctactcaactacaaagatttatttaatgtactcttaatctaactgagttttgttaccaatgacctgttgcatgcttcaataccgtgtactgcctgagttgtgcctcttgtgtgctagattaaaagtgagacagagacttgacttgatcctctgagctcaagctattgagctggtagtggcagaggactgagggtacctgcacagtttgattcttttccacgtgtaagtctccattgcagaattgtcgtgctttgagaaaacacctgaggcagtgtgggagttgaacgaccctgctgtcctttttaacctgtgttgtcctagaccctgtcggggcagtcaggggacactagagatttgatctcatgcgagtcatcaataggacaaaaaagttgtggtttggggaggtctgtttgttacataaaaaggacctttcggtgtaagaaattgccgtttttaccctgccctggctggcatgtgagaagccatggaaggttgtggttgtaaatgagttgtctaaaggggtgcagaggcctgaggtttctaaaagaaggtagatttctacagagctgagtgttggttcctttttcttattggttgaaaattacctggtagtgatcagaaaacttagatgctatgtaactaaaaaaaaaaaaaaaaaaaaaaaaaaaaaaaaaaaaattcccgctcatgagttttgactattggtgagatgttttccgctacagttaacatgacaaatgtctcagtggcaaaaatcccctttttgtaagcccccatagtctagaggcagttttctttttaagaatcatgccagagcctgagtcgagcagtatgctttcttggtttttgagagtaattgtgtaattgtagagggagaaatccaattctaacctaagaactgggattcttctgtcatcttgtaaaccgtatattgaaaaaaacagaatgtcactaaatgcatattaagtcaagtattggaaagtataaaagaaaaatcattctgacaatttctaagccagaagcaaacaagaattactgaaatctaccccatgaatacttggaaggcagtaattgtgagtgacacctcagttcatcaaccccttaataatatcagcttaattttaatgacaactaaatatgctgaagtgaggatttagtattttttaaaaaagcaaaacaaggttcagtagtcctcagcaattctccaagtttctctctttgcctaaaatggtcatagatcttgatttctctgaatcgtgatgaccacacccagtcatcttcacagcataattgcaggtggcagtaaagagagtgtgctgggtaaggagcagttgctgggtcattccttgggccccgacctgcccggggagtagccctgggggagagagggcagtgttgcctatcccagaggtcccagcagtcacactgctctgcaggccgggctctctttatagccagagaaatcaccttaatgcagtctctttagttgtctgctgaagctgtagttattatgggccacttacatgaggctgagaagtacgtgccggagctcacacactgcctgttgcggttctcttaacatcagttatcacagctgcctgtgggtcccgggtatttccattcctgccccttgttggcccgaggaaggatgtggaaagagcacctggtgggatgaaggtccaacagcctgtgcctctccactgctggccctggagccggcagcagtgaggcattcattgtctgtgttgcggtgtattcccagcttcagtgctcttttcctttttgcctgaaatgtttatgcttctctgcagccagtcctctaacaaatctcaagaacaaaggtaagacacttggtttttgtttccaggacccttcagaaggtgacatcagatattccctaaattcagacaatgagggatacagagcgacttggcatgtattatttctcccatgtaaggacaaagggacagattattattgttatttctgagacagagtcttgctctgtagctcaggctggagtgcagtggctcaatctcagctcaccacaacctctgcctcctggcttcaagcgattcttctgcctcagcctccccgaatagttgggattacaggcacccaccaccacgcctggctaatttttgtatttttagtagagatggtttcaccatgctggccaggctggtcttgaactcctgacctcaggtgatcctcccgcctcagccttccaaagtgctgggattacaagcatgagccaccgcacccggcctcacagtgacagattctgagaaacagcatgcaaaacatttgaaccattttctacatctcccattgttgcatagagagtgtgcaccgctgctatcttgccagatccacactggtcctcccgaaagccaggttcatacacagcaactttttaattattctaacagttacccattaacagtcgactcctgtatttctgagagtcttgtactcacctctgaaatttaaaaacgtataaagagagcctgggttaatcagttctgcagcccctacgtgacactgtgctagttctccttcttctgtctcctccttaccctggccctgcacccctgtacttaagagggagaggtgggaggtgctgtctggtatcatttgctgcctcgccagtagagggtgccgctgtgcagggtaactgcccgcctgctcccttcctgacctcccctgaccccgaagatcactacctctgtcattcaggcattggggtacatcctgataagtcgtgtcagaactgccaatttcaggactgagatgtgtttttaaaaaacaaatccttataaactccactttgtactttagattttaaaactggggaaaaatgtgatattctttggaccacttttttaatttatataagccttaatgaacagtgtctatacatttgcatacacacacccccaccccagagtgttctcagtatgtcagagaaagtgccacagcattaggacgggagcttggagaacgttttctagaaaagggttagcttcctgttggcatgaaattttccaagcaaacctcattaaacatctgttgtttgttaaagatgttccactgaaagcaacgcatgtttcaaaggcacgtctttccgttcgttggttttctgtgtgtaaggagtagcattgctgttggcgcctaacctcgcgtgcactgcattctcaaccccgtaccagtgcatcatcagaagccttcctcgtgaccataactctgtgtctgcagatatgtgttcccgtgtaagccagttttccccttttactcagactgatttcacctagattgtcacggtttccttcatgttaactttgcgtgactttgttcttcctttactactctgtatgtaatatatatacatatatacgtacatatgctgtccaaatatatttgtatatatttgtatagcatttttacacctttattgagtaatctggtttcgaaaggaggtgagagtttagtcccttctgcagttttctccaagctgtgtcctgtgaatttcaacccttggagcctaagaaaaccctaggaagatgatgttaatttgctgtcatttcctaattcaggatctatcatcaaatgaaacatgaaaaaaacagtgacttttaaggtgaaaagagtttcaagcattccaaataaattatcaatgtttcataactttttattataaacccacctcctaataggaagccaagtactatttgatacagtggtaaaaaccaaactaccttgaatttttttaaggcaacttatgaataatgctcattttcacagtcagaatagctttaaaatatggttgaatttgatacacacaggaagttttcttgaagaacaatcctttcgcttttcttttttcttgagagatctaaagagaaactgtagattgttttcctgacagcaaaagactaatgtgacaaaatgaagtcattgtaaagaagcgatgcaacttgtcaaatatttaataaagaattatggaagctggaacattttctacatca

SEQ ID NO: 110 - protein, 824 aa, Homo sapiens
SRQKGHLWSQADENRELALVQTKTIKKTLNPKWNEEFYFRVNPSNHRLLFEVFDENRLTRDDFLGQVDVPLSHLPTEDPTMERPYTFKDFLLRPRSHKSRVKGFLRLKMAYMPKNGGQDEENSDQRDDMEHGWEVVDSNDSASQHQEELPPPPLPPGWEEKVDNLGRTYYVNHNNRTTQWHRPSLMDVSSESDNNIRQINQEAAHRRFRSRRHEDLEPEPSEGGDVPEPWETISEEVNIAGDSLGLALPPPPDGSRTSPQELSEELSRRLQITPDSNGEQFSSLIQREPSSRLRSCSVTDAVAEQGHLPPGAKDSPVRRAVKDTLSNPQSPQPSPYNSPKPQHKVTQSFLPPGWEMRIAPNGRPFFIDHNTKTTTWEDPRLKFPVHMRSKTSLNPNDLGPLPPGWEERIHLDGRTFYIDHNSKITQWEDPRLQNPAITGPAVPYSREFKQKYDYFRKKLKKPADIPNRFEMKLHRNNIFEESYRRIMSVKRPDVLKARLWIEFESEKGLDYGGVAREWFFLLSKEMFNPYYGLFEYSATDNYTLQINPNSGLCNEDHLSYFTFIGRVAGLAVFHGKLLDGFFIRPFYKMMLGKQITLNDMESVDSEYYNSLKWINDPTELDLMFCIDEENFGQTYQVDLKPNGSEIMVTNENKREYIDLVIQWRFVNRVQKQMNAFLEGFTELLPIDLIKIFDENELELLMCGLGDVDVNDWRQHSIYKNGYCPNHPVIQWFWKAVLLMDAEKRIRLLQFVTGTSRVPMNGFAELYGSNGPQLFTIEQWGSPEKLPRAHTCFNRLDLPPYETFEDLREKLLMAVENAQGFEGVD

SEQ ID NO: 111 - DNA, 254481 bp, Mus musculus
  misc_feature (1)...(254481): n = A,T,C or G
tagcggtattagtggaccctcctgggatttcaggcatggggcctacactggcttcccttgtatattctcttacagtatgtatctgcagatgtcttagttagggttttattgctgtgaagagatcacataaccaaggcaaggtcccttagaagggacaacatttcattggagctggcttacagtttcagaggttcagtccattatcttcaagacaggagcaggcagcatccagtcaggcatggtgcaggaggagctgagagttcttctacatattgatccacagacagtaggaggagactgtcttccactgcaaccaggaggaggctctgagtccatactgggtggagcttgagtataggagacctcaatgccctcctgcaccgacttactccctctgttccaacaaggccacacttcataatagtggctaagcattcaaacacatgaatttatggggccaaaccttttcaaaccaccacagcagacttgcattaatttttaaaagtatattctgaagaactccatcttggacactcttcaacatgtgtcaagacactcactcaggggctggagagatggctcagcttttatgagcactgactgctcttccagaggttctgagttcaattcccagcaaccacatggtggctcacaaccatctgtaatgggatcctaagcattcttctggtgtgtccgaagacagctgcagtgtactcacatacataaaaataaagcttacatagatacacagttctcattactgcatggaatgagctctgacagctcaggccagtgttcttcagtgttggagtttctggttcaacaacgtccatgcatctatgtttacactggaaatccttggccaagaaagtgactgtgcacttgttgctgccttggtttgaactttgcacccaacacgtaaatcctgtgcgcttttttcatcagtaaaagtgaattttggactaaacagtctctttcttctgtcgaactcttagcttttgagcttgagagatttgccacagtgtataatacgttttatggatgattttgacgtccagtttgttacgtccaataatttccttatagctaagaatttgagccagtagatatctgtccttgagaaagtaacaacctatagatagaaatatgtaaaatgaactggagagatggctctgtggttaagagtactagctgctcttctagagaaccggggctcaattcccagcacccacaaggcagcttacaatgatctatagtttcagttacagaggatcctatgtcgccttctgatcttctcaggtatgcacatgttggaaagatatatgtgcatgctacacatccatatataaaataaagcaatacattttaaaatttaaaaagagtgtgaaacatcctagtcatattggtgattccctcacttgaggttgcactttcttctacggtttgctttgtgaataaatggaatatttgtaactacgactatctcttagtcactgttcttttgctgtgatgaaacaccatgaccaaaagcaagttggggagggaaggctctattcagcttatgcctgcatatcagtatcagtattcatcaaaggaagtcaggtcaggaacccaaacagggcaggaacctggaggtaggagctgatgcagaggccatggagggtgctgctcactgccttgctcctcatggcttagtcagcctgctttcttagagaacccaggaccaccagcccaacaatgacatcacccacaatggcctagaccctcctccattgatcacaaattaagaaaatgtcctacaggcctgcctaagaccccatcttatggaggcattttcttgattgaggctccctcctctcagatgactgtagcttgtgtcaaggtgacgtatggctacccagcacagactaagggtagcatttcacttatcgcttattttcagaattagacgtgaaattgtctgtaagagtgatcagtcagcaatttcagtgtgacattttataaatggtatgatatgctcagtattaactatttaaatgcctttcttgtctcttgcagttgaaaacaaccctcgaacaggaaatcttgctgcgctaactaaggtcttcctatctagaaccagggagctcaggctctcagccgagtgtcagaagtaagttacggctcagcaccaccgcaccatgcttggcgccacggggaatcgtttttatttgatgcaggggataggctgtggtcttttgaaaacccctgtggagaaattatactctctcttttttttttttttttttttttttggtttttcgagacagggtttctctgtatagccctggctgtcctggaactcactctgtagaccaggctggccttgaactcagaaatccgcctgcctctgcctcccaagtgctgggactaaaggcgtgcaccaccacgcccggctatactctttattaagagaaaaaaaagtaagagaagtttttattttaggtcttaaattgttggtgtgagatgcagtgatttgtttgattccagcactttcgttagttattaaaattatattctttaaaatgattagtaattatataattatttttaatccagttttaaaattaatcaattcatttgttttgggtagcacataaaatgggttttatggtgacgtttgtttgctcatgttcatctgccctcctttgtcatgatgtcgttgttactgtaaaaggtgttccctcccgttacctctccttgtgattactaatctagtttaaatagcgacttagattgatatcatctatgccacatctatagctctatgtcctaaatactggatctgtggatgtctgattgtttatgactagagcattgactttgtagcccaggctggaccaggcactctggtgctttaagcttccaggtgctgggatatcaggtggggccgctgtgcctggcgcttataaaattgttatagctagatagtgtcatctgtaagattgtttattgctttgcttaggaagaactatctcaaatcgtcctgtcattaatacaaataacaggcacgatgttgtgttgccacagatgtcccctttggtgacattgtatacttgcatatgttctctttatgctaccatagttttagctttctttgccttcacgtgagacagttataaagctaaggacaaactggttacacctacaggtgccagtgaccgttttaatccagtagacttcactcagtagagttcgatctgagggaagatacagtagctgccactggctctgtgtaactgcaagatgcagacattgtcctatccacagcccgtgcagagccatcctcacattaggaagacacaatgactagaaacaaaccgcccttgcctacgatgaactactgaaggtgaggtgattctggtctttcctttccagccacatcttcatctggcagacacacaatgctctgtttattatttgctgcttgctgaaagtgttcatccgtgagctgtctgaggaagagctgcagcttcattttacatatgaagaaaagtcccccggcagctacagtaagtaataggtccatgcagaccttaggattaaagtaggatctggcctcgtggggaaggaagggtccccctcccagcagtcatctgtgacctccacgtgtgcaccgtggctcctgtgctgctcacacctgctcatcacacacacacacacacacacacctgctcatcacacacacacacacacctgctcatcacacacacacctgctcatcacacacacacacacacacactcannnnnnnnnnnnnnnnnnnnnnnnnnnnnnnnnnnnnnnnnnnnnnnnnnnnnnnnnnnnnnnnnnnnnnnnnnnnnnnnnnnnnnnnnnnnnnnnnnnnnnnnnnnnnnnnnnnnnnnnnnnnnnnnnnnnnnnnnnnnnnnnnnnnnnnnnnnnnnnnnnnnnnnnnnnnnnnnnnnnnnnnnnnnnnnnnnnnnnnnnnnnnnnnnnnnnnnnnnnnnnnnnnnnnnnnnnnnnnnnnnnnnnnnnnnnnnnnnnnnnnnnnnnnnnnnnnnnnnnnnnnnnnnnnnnnnnnnnnnnnnnnnnnnnnnnnnnnnnnnnnnnnnnnnnnnnnnnnnnnnnnnnnnnnnnnnnnnnnnnnnnnnnnnnnnnnnnnnnnnnnnnnnnnnnnnnnnnnnnnnnnnnnnnnnnnnnnnnnnnacacacacacacacacacacacacacacacacacacacactcacacacacacactcacacacactcgcgcacacacacacacacacacacacacacacacacacacacacacactcagcagttaagcatggactttgacaactccaggtggcctgcaacaccatctgtttcctttcttaaagcggccatcaggaaaaggccttcctcctctgccgtctctgtccatcacttgttttgttgctgtaaccaaacacctgacagaatgggaaagaacgggtttcttttgcccggcggagtttgagggtgcattgagtcatggtgggacgtggcgtcatggtggggcgtggtggcagcaggagtacgaggcagctgtcatcttgcatctgcagtaaggaagcccagagagtccattgctggtgctcggctgcttttgcctttgatttggttggtacctcagtccgagggatggtaccacccacttctaatgtggacgctgtgtcacgggcatgcccagaggtctgtctcctgggtgatttgagatttggtcatgttgacaacagtgtaagcatcacaaagtctattccttgtcatcccaacaaacagaccacttactacttattattgttgcatttttagatttatttactttatgtggatgactgttttgcctctgtgtatgtatgtgtaccatgtgtgtacttggtgcctgtgaagggcagaagaaggcatggaatgctctggaactggagttaagggtggttgtgagccatgatgtatgtccaggtcctctctgcaagggtaacaagtgttctttattagtattttatttcaattcactttacacaccaatcacagctcccccaccaatcccacctatacatattcatcctccccactgccccctcctcttctcctcataaaaggggactcccccctgaggtaccactctaccctgggatatctaatcctagcaggcctcccactgaggcctaccaggcattctagataagggagatccaatggcaggcaacagagtcagagatggccccctctccaattgttaggggacccacatgaagaccaagtgtcacatctgctacaaatgtgtaggggccctgcatccagctccttatgctccctggaagtgatcttaagcaccgagacatctctccagcgcctgtgtgtgtgtgtgtgtgtgtgtgtgtgtgtgagagagagagagagagagagagagagagagagagagagagagagagaggctgtgtgcacgatgccatggcatgcaggtgaaggtcagaggacagcatttaggagttcgtttctccttctactgtggggtctgggaacctaactcaggtcatcacgttttgtggcgagtgccattgcctgtaaaacaatctggcctctcctcacatataatatataaccttttagccacgagcttctacctcttacctccatagatgtaaagccatgtcatgatgtgaaactcatttgttccatcctcaagtttccatggtctttaatagtttcagcactgtctaccattccaagtttcttttgtttcttttgagactgaacaggggtgctgctcactggctgtttcccctgtcttgcttagcctgctttcttatagaacccaggaccaccagcccagggatggcaccacccacaaggggcagggccctttcccactgatcgtcattgagaaaatgccttatagcttggtgtcatggaggtgcttgctccactgagactctcttctctctgatgaccctaagtggacacacactcagcaagtgcacttagggatccttctgtcatgactgtaagagcccctggcacacggcggcgtcttttctgtgtgaacacggtaattgcagacatccagaagcattgatgtgcttgggaaggcgtaggtcacagatcctaagtattgcagggcattgacgtagagaagttttgtttttagaaaagaatgagtttgtttccttttctttttgtgattagtttataacagcattttagaatgctaattaagccaggtggtggtggcgaatgcctttaatcccagcacttgggaggcagaggcaggaggatttctgagttcgaggccagcctggtctacagtgtgagttccaggacagccagggctacacagggaaacccagtctcgggaaaaaccaaaaaaaaaaaaaaaaaaaaaaaaaaaaagaatgctaattaaaaatatttaatatgggctggagagatggctcagtggttaagagcactgactcctcttccaaaggtcctaagttcaaatcccagcaaccacatggtggctcgcaaccacccgtaaagcgatctgatgccctcttctggcatatctgaagacagctacagtgtacttatgtataataataaataaatcttaaaaaaaatttaatactttagagtaactccaatgaaaatgagcagaaacattgactccaccaagattttctgaatataggtgtataattgtctgtgtgtgcttcattgtggttctggctggccttgaatgcagtctgcctatgtacctgcctgcctgcctgcctgcctgcctgcctgcctgcctgcctgcctgccttccttccttcctgccttccttccttccttcctaccttccttcctttcacgtgctaggcttgctgctctgcaccaccatgtctacggcatgttctgttttgaagaaacaagtttgttctggctttcaggcaccggaaactgttttggaggtatgtgagtgcccttgatgaaggttttaacgtttgtcattggcgcagtatactttgggcagcattgagaacctggccctgtcctgagtgctgcggagctgcggctaagtctctctttttaccagtgcttttactttgtccttttaaagatttatttttattccctgtgtccggctgtcttgtctgcggtttatatgtgcactgtgtacatacacggtgctggagacggtgatggacagtgtgagcatccttgtggatgctggaaactgcacatgggtcctctgccagaacagccagagcctataactgcagaacggctctccagcctccagctatttattttaatgaatggggtgtgtgtgtgtgtatgaatgtgtatatgtatgtgtgtatatgtgtgagtgtgtgtgtgtgtttgtttcattactgctttgcttctggtgatcagtaagggtctctacttttttgatacataattattagcataaatgataaaaattatctaagccaagaaagtgagagagagagttaagttagctacttttaataacaagcagcaattggaggataaactccaagtggagggctgactgggtatgtaagagtgagtttgaatgcactaagtgtgcttaactgaactgagatcatgaagtaatgaacaagaatcgacgagagcccttcagggtcaggaggatgcagcaggtggtgtgcgtctgtcgccagcctgaagtgcgagggactccagttcaggactatcctaggctacacagtgagctcctttctcaacaaaacaaacgaggctgcatcagagaggcggactgcttagtcaagaagactcggagagtgcttgcttacagaagggtggctgagtctgggttttagcattgggctgccagtgcagtcatcaaagatgaaaatgagaaagaagtgtgttgtgttagagaggcagctcagtggtgagagcactggctgctcttccagaggacccaggtttgaatcccagcactcacatggcagtttaccactttgagggggtcaagctccctcttctgggatctctgtgctgcccgtataccattcatgcacatacaattaaaacgaggtaaccagagaagtgttagaagtattgcactcatttctgaaaacacggagtttgagataatggtcactcatcttggacacgccagtagacagctggtgggagtctgcagctgtggaactctgactgcccgcgtcttgtccaatctgtgaaccgactagagtctgccctgccgagtgtgtgcgtgagagacagtttgacagaaaacaggatggtgtgtgagaggctgaaaggcaatctttggatttaggaatcactagcatgtaagctgtgatggggaggggcgaatggagagaggtggggggaggggagggaaaggagaaaaaacacaccagcctatggcagagtgaatggaaggtgtgtgttctggaggagtgctggcaagagaacagagaatgccaggtagctgtgagactgtacatgacccgaggaaatcatttcatgagggagttgatgtcatgagtgtccagaacccaaaccagacgtcacaaggctatcctctggcttaagcagtttggagtcccttagctgggggctttgggacagaaatgcttgtgttgggatgacagatcacatcctgtccttgccacttacaattctctgaccaggaaagccttcttgtctttggcttttgtttgtaaggattcaaaattcattctggcatctgtggattgacaaggggctgtggggttcatcaggatcaagggcaaagttgtatgaatatttgggggagggatataggtctaaatatctttgcttcaggtggagcagctaaagcagctttttttttttttttttaaattgtatctttgactttatataaaattccatcaaaagaagcagtgggaggtatgagaagtttgaaagttactagcctgtaggagccttaaggttgttggtttgtttttatttttatttttttatgatttttgttggttctttgtgaatttcacattatgtaccccagttccactaattccccccttccctcatacctgccctcttcccttgcaacaccctccctcccctctgccccccagaaaaaaagctacagtgtgtctggaagctacagtgtgtctggaaacagtgttcccttctgtccacacttctttgcttgcacatgttcactgcaatgacccactgatcaggttccaggcctctggcttctgctactctatcaatactggaatctcactgggactcctcttggatgtcctgttgttgccctgtgtcatggaaatcttgtagttttggctctgtaggaccagccccttcatcctctctagcagttcattgatggggtagatgttggggtggaccaattcaaagccctggatctgggcctgagaggatctgagctgctctgcccttcagctctcgtgctctcacacccttggcctggttcactgtcaacccttgcaccagggccagctccacccttctgcccaggcgaggtgctggggctgctctcccgagtgttgcagcaggtgagggccagggcccgctttcttgctctaagattacaagtacatacttgtaatcttagaatttgggggaggcttgccagttgaggactacacagtgagacccaatcttgaaagcaaaaatagagccagtgaggtagttaagcaaatcatgcgtttttctaactctgaaacgcacgtaaaagtagaaggagaaaaccactccacggagttacctcctgcctctcacccgtgtgctgtggcgcgtacaccgatacaaaaggaaaactgtgtcaagttgttgttaaggctgtgctgggtgctggcttgctcaggatctagattttattcagaggttaaaatagtgttggaatatatgtactaataaatttttcttattagaaatgaaaacttaacatctaagtaatttcctcattgtctaccttgtcaaaacaaacctttgtgtgtcttactaggttctgactctgaagaccttctggaagagttgctctgcagcttggtacagttaatcactgatactccactcttgtaagttctgcctgagccgggcttgctctccattctgtaatgaaaatgagaattgactgtgctgaagaggggtgtgtgtgtgtgtgtgtgtttgatggggggtgtggggcaggcagtgttgggtgaattccttattcattctcttctccccttttttgttttctctttcctgacccctcccactctctctgtcgttttgagatagggtcttaccatataactctggttaccctagaatgccctatgtagaccaggctggccttgaacttacaggatccacctgtctctgcctcctgagtgctgggattagaggcatgtgccactatgcccagctccccatattttctgagacaggctcttttatggaaccttgacttctttgacgtggctatactgccaggccagcaagcctcaggatccgcactgtggttgcaggcctgcgccatcaaactcggatttgttgtgggtgctgaggatcctaattgaggatctactgagctatctgcccaagccctgtgttgaagagcttgtaggttctggtatagtgtgtaaggattgcacactcataccattctttctattctgcctggtgtctgtagactgtgtctacctgacttgcttgcttttctgttgctgtgacaaaacaccatgagcaaagcaacttaaagagaacagaacatttaatgggggtcgtagtttcagaggttggtagagttctgtggccatcctggcagggagcatggccatgggcaggcgggcaggggggcgggcaggcaggcatgatacttggagcaggaactgagagctcactttgagacaaccatgaggtcgagagagctatctggaagtggtgtgggcttttgaaacctcaaagctcgctcccagcaacacacctcctccaacaaagccacagctcccaatccttcccaaacagttccagaaagcggggacaaagcactcagatatgtttgaggcttggggcccatttttatttaaaccacactgccatcaaacaagaatttcttgttaagggagaatgactgagtccttcagtaatattaacatggtaggcagaggactacattagcttggtaagacgagatcctataggtctgtaaagagtttgagaaaggcaagttgaatctagtgtatgtggtagaaaaagcaaactgaccacagagtatactctttccccccagcttcttggttttgttttgagacttttagggaggacagagttctttccagtgttctttgaagctaggtgtgttccttgagatgtcattggggaggtcctccaatgagacttgtcagtgaagttcattactcaatgaagaagtgtgtggttctccttctgacagcctttttccttgtgtcccagaacatagatgaggtcttctgagttgcacacccatcctggcaccacgaccagtagtctcctagaggttttgctttgatgtcactgagccctgaaccaaggtcaacaagtgctgttctccttcccttaccctggacgtctcatgtgacaagccaaacccttagctgtttatgctgctggaaccgggtttccattgctacagctcagtgcagttcctctgtgtgtaaaattgtctactcactatgagccgttgcttatcacccctctcatcacagatcctcctctggaatcctaagccgtttctgtcatcattgctgtctttatacactggctgtgcactcatgtatcttggccctttggaaggccacgaacctttgtattgtctgtgacattcttccatcaccagacactttaattactttggagaatttacaaatggactgactcttgagaacagaacctttcgtgttggcctgctggtgccatgtcttgtcctccaccttcagctgtctgagtagctatgatgagaatacaactatcgccttacttattgggtgtgtgcgtgcatgcgcagagacagccatgtgtgggcatgtgtgtaccatagcacatgtatggaggtcagaggataaatgtgagagtaagttctttcctcctaccatgtaggtcctgaggactgagctccagttatcagacttggtagtaagcacctttacctgatctatttttctggttccagagatacacatttgaaaggaattacatttatatattagacagggtctcataaatcccaggctgcccgtgtagctgagaataactttgaactttataaaaagttgttttgtacatatcagtgttttgcctgcatgtatgtctctgtaccatgtatggtcattgcctgagaagaccaaaagaggatgttggatcccctggaactggagttgtagaagcttgtgagccaccaacgtgggtgctagatactaaacctgagttctctggaagaacatccagtgctcgtaactgctgccccgtcttcctagccccagccttgaacatttcctcctccccctcttatctctcgagtgtggagaccccaggtctgttccaccacatgcactttatggaggctgcacacaggcagctagacatgcactccaccagctgacctgcatctccagccgtgggaaggaagtagtttttagataaagaagttcttcaggtttatcatcataaagtaacaaacacagaggggttttgtcagaaatggcccagaaacaaaagacaagcctttgtgagcaaatacgcccttggggatactgtacacgaatccatcctttcctagagctggagagctgcaccatgccttgtcctgcgttgatgcacggtgagctgagctaagtagacagcctgctcggggaggacgtggggatagcgtcccaccaatgtctggtggtacacagaattgtttacccatctcccagtttttctcttgctttaagtagaatttgatactgcccagggtgaccgtgcaagcacagcttacagtctcctctttgtacccacatgtgtcacatggcttgcactgatgcagagagacttacgccaccaggtgtcacttcactgagcgcatgcatttcaagtcctttgttccttgccctgtcctttttcttacttaatatgggatataagacaatgctcagttcatactgaactacgggtaagagagtcacttgcaaagggtaggtcctaggagcatgggctgttagtaatattagtaagattatttgagtgctcattctcacctgcattcttttttttaagatttattttatttattatatgtaagcacactgtagctgtcttcagacatcaggagagggaatcaggtcttgttacagatggttgtgagccaccatgtggttgctgggatttgaactcaggacctccagaagagcagttagtgctcttaactgctgagccatcttgccagcccctcaactgtatttttatgtgagaaagccagttcttgtcttggttaagtcannnnnnnnnnnnnnnnnnnntgcaccagaagagggcatcagatctcattacagatggttgtgagccaccatgtggttgctgggatttgaacttcggaccttcggaagagcagtcgggtgctcttacccactgagccatctcaccagccccgccctgtcctttttcttacttggaatatgggatataagacaatgctcagatcatactgaactacgggtaagagagtcacttgcaaagggtaggtcctaggagcatgggctgttagtaatattagtaagattatttgagtgctcattctcacctgtattctttttttttaaggtttattttatttattatatgtaagcacactgtagctgtcttcagacatcaggagagggaatcaggtcttgttacagatggttgtgagccaccatgtggttgctgggatttgaactcaggacctccagaagagcagtcagtgctcttacccgctgagccatctcgccagcccctcagctgtattcttatgtgagaaaaccagttcttgtcttggttaagtcactgtggtcaggttttggctatatttttttttcagatgggtgtggagaacttatgtaattccctgctcttttctaatcatattaagctagatgttttgtatgcttttgaccaaattttaaaattacattgatataattttaaaattaagcaggtcagattacacatgcatctaaccctagctcttgggagactgaggcaagaaggtggtgagttagtggatagcctgggctacgtactgcgttccagaccagcctggactgcatagtgagattcagtctgaaataagcacaagattaggcttttaatggcatttgttttcattgccaagtaccaacaattgaatgtgtacagactttagcctttattgatcatgttttgttgaagttagggagttggaagtattaaatatgtttagataataaagaggtggttagtagagtgactggaccagctgtgtggaagagccaacagcgttggagtatatcacacattcagtgttttaatgtgtttatcctttttaaatgaactgaaagtgcacaggcagccagatgtcttgtgttatgtatgctcagctagaagcagctgctgaaacaatttcttatgatttaatgtccttggaaatccatcttacaagacggtttgtcttggttacagtttccatgtgaaagcaactactctgtgtttcttctaccccaactgctccgcagcattccagaccagcctgtaactgaaggtagaattagcatggagccggaagccctctcagctcctgtaatgagaacgtcagtctggctggaatgctttactgttgctcttgcttacctgtgttgaattagcaggagaatcattagaagtctaattttggtagtcatgtaatttcaaactaacctaaatctttctttcttatgagactatattaaatagtctattaaaattgagagcaaaatgattactaagaataacatacattatgtatgtatgtacccatatgtgtatgtgtgtctccgtcctcccacacagctcttgcttgacttaagctagcttgaacttgctgtgtggctaaggatgaccttaaacttctgcatctcttgcccccaacccagggtggtaggattacaggtgtatactgtaatgcctggttcctacaaacttttaaatgactctttattagaaacaggatcaggctaggcccaggtccagtcgctaatcccagttattcaagaggttctcgagtttaagacttacctaggggatccccactttgaggaagacaacagtatctgaacagggccctctcaagaccgactctgtccttgtggagtaaagggcatgttagatcgattactgcaagtctgggaggttaagactggaagcgctgtgttgtttgaaagacaggaatgttagaagactgagctcgggctgtgtttcagagtctggaccaggacacagctaggaagtctagggcttctccctcagttccactttggaggagttgaggaggtttgaaactgtctgaaccgtgacatcctttatatcaacgtgctttctgaaatataatagttataagtgcacattcattcagaccgtagtctttcagtagtgtgttgtgaaatatctgaatactgaagaggtttattctcccccagtcattctttgtgtttgagacagggtcttaacagtgtagccctggctggcctggaactgttgtgtagactaggctagtcctgaactcaagagaggctcacctgcttctgcctttcattgccgggcttgaaggcatgtgctaccatacttggcttgtacgtggtttccttagttgtcaatgagagcgaaggcccccagtgctcatggttgggggtggaagggcttttataactccaggataatgtctttcttcagccctccatgttgattcacagaggcttctccaaagccagctcagtggaaggcaagagctcgctacagcaaatcagctttaaattttcagtgctgcaaattaaagtctagcacagctttctggatgaattaggaagttaagacatcataagtaagcattgaactaaatgttgtagaattttcatacaccaagatagaattgtgtattaaaaggttacaataggcatttaaaaaaattttttttaaaagatttatttatgtattatatataagtacactgtagctgtcttcaggcaccccagaagagggcgtcagatctcatcatgggtgattgtgaggcaccgctgaacccaggaccttcagaagaacagtcagtgctcttaactgctgagccatctctccagctcgtggtcctgtgtgtgctgaggcttcttcactcagtggtagagtatatacttaataataagatgaccttgaatttaatccctggcacaaagtattacagctacacttctaatttcagttttaaaactagccatcactcctatgacagcatctgaaatatataataattctctccttttagaatatctctgttggctcaaatagctatttctaaattttcgtcttaatcgtttaaacttgtcagttgtttttattaaacttatgttccatgtacagtgctgccaggttcctgcccaggagtcagtcagaggagcatggcttttccttctgggttcattagctttgctgttagccaacaccaacactcatttcacgatggcttttgtccttgtccaagtgtccccctgtgccccagcatcgcagcacaaggtcacggcttctgtcatttattcacatgaagtgttaacttgctccagcagtagtctgttctaggacatttcagcccagatgctggaaagctcttaggatactgcggcagccaaagcagtgcttcagctcactaaagttgactttggtttagcaattgtgtaatgaaaataaattttccgaagattatacaaggacttcaaaacaagaaagatctgtcggctgaaaacactgttcatttttttaaaaaatcactccactgagcatggtagaattttggtttctctcaagtattggcctcttcggactcatttccctgatgacttggcgtttaagatagttcaattaatattttaaatttagttattatagaaattaacattacctcaagttctttttttttccttcttagcattatcaggagttaaagaaggaattgacatcagagctcacccactgcccgcccttaaaggaaaaccgagatgcatagattccgtgttgaagtgagcagagctaataaggagctgaggaagagagctagctttcctggttttgggtggagagttcttacaacatgctgtaacaggacacgggtgctgattgcgttcttcatatggcctcatttcctgtgtgctcggattctgataggctgaagctcagtgtggttggggtaacctggtcttgtataggtcgataccttgatgtgagcagagccttctccatgagagtgcatcggcaccaacctcccttgtctttccagccttcctctttgctttcataactgactcttggctttcagtttctttgtaccatggaaactttaatgtataggaacagttaggagcacagagtcacatttcacccaatttttgcaccagggttgaaaaattctacatattgttctgaatcttgctaagattttcagtctaaccgaggagtctctgtatcccagtgctattttcgttttcaaataaaaacaaataaatctaacacctactattcatcctatttttaaaggacacaactcagtggttttgtgtgtattccccatgattctgcagcaacagagaaaccacaagcattgtctgtcacatccccacttgtcccctctttctcctcatggcaaacagtcccctctttctcctcctgtgggttttgcctgtgctgggtccctctggactgacttttcccttctaattctgtatggtctgctcaccttcatgtattgtcatgtgtgttgggactttattttctccgatggaggttggggagagtgaaaagtattctattgcatctatatgccacattttgaacgtgtattcatcagttaatagactttgtattttgttatcttttgccattatgtgtaatgctatgaaaatttacgtgtaagaattttgtgttggtatatgttttcagttctgttaggtatatctacctaggagtggaattgctagagcacatgggactctgggcatgccatttcgcattccagagtctgtggatgaaggttacaatttttctacctcctttcttattcagaaaattccatgactatatttatttattagaaacactaggcttcttttcttttctttttttttttttttttttttttttttgtttttttcgagacagggtttctctgtgtagccctggctgccctggaactcactttgtagaccaggctggcctttgcctcccgagtgctgggattaaaggcgtgcgccaccacgcccggctaactaggcatttctgatgtgaatttatagtatattttttcttgatttgcctattgtctttttgttattatttaattgtactaagaacataactttgtttcggtaatgttgattttttttttcctcttgactgtcctggaacccactctgtagatcaggttgttcttgaactcacagagctctgcccacctctgcctttgatcttatgcttattttataaaatgggtctgagtattagagttggtgttaggtggccaactagtgggtgcctccttgggaagagtgagttctaccctcttctttcccagtccttattgcctgcagttctctggctgaggcccctggggttgtacccttccttgttagcatgtttgtccatgtgagttttcagatcttgtttaggcagtcatgttgttgaggcgtcatatctaggagagacatcccacagcagatttccttgtcctctggctccatcttcctgccacctcttctgtgatgtgttctgagcccgagctgcaggaatggtgttgtatctattgtgatgggtttccaccatgagtggttctctgtattttgggcagatgcggctttctgttgtggtgtcagtctgctgcagagagaagcttctttggtgaggggtgagagctaggattatctgtgggcatcagggtaaattttagagcacagttaggctatgctggtttagtaaagtgctggtgataggttctcgctgagatccgtgaccgcgctcgcttgctcgctcgctcgctcgctcgtcctgggcagttgccttgcttccaggcatcgtttccctcctgtcgagtgagccttaaatccaggttgttcccactggatatgagctgtactcacacacctctagggatctcctgctgtgctggtcgttgtcgtggctcgaatgcatcacagctaagtaggatattagcggtcccttaagaacatggtgttttgaacctccaggaccagtggtgtgcagcttttgatcatttccaatgaagtgacagaatattaactaagaacattcccggctgaaatgagattagacgcactgcttaagccgtctctcatgttttattgatgttttgtcatggtgttaaaatgatttatttttttataaaactttacaaaatgtttattttcaaattctatgtatgtgcacatgattgcgggcacccaaagggatcgaaggtgtaagattccctggagctggacttgcaggagttgtgaaccacccagcaagggtgctggaaaccaagcagtgtgtgctcttacctgtggagtcatctcttaagccattggtatgctttttcaaggatggtctcatgtagccaaagctggccttcaatttctgattctcccaaattttgaaactgcaggcccgagccaccatactggcttttcagacactgtaggttatgaagcaagtgcctgtgccactcccagttgaagtctactcctcagtgtggaggtcctagggctcgaggcttttgggaggccatctctcaggaacgacaggagccatagctatctctcctcaccactgtccaccttacacggctgcagcaagaaggcagctacagcctcaagaaagctcttgacctggaactaaattggttggcatcttgacctcagagtgctcagcccctgtagttgtaacaaaggaatgtttgtttatggtaacttgttggagaattcatactctcaatgacaaagtcattacacagaaatcatataatagcagctatcaaatgataaataaaaattaaaatgccattaaaaataaaacaaaacacattggattaaacttaacaaatatgtgcacttaagtattaataactaaaaaacgtgactagtgaaattaaggaaggcctaaatgtgactgtatatgtatgaattaaaggcgatagaaatgaggtggcaggtcagtcagtctatagattcagttagtcacatttgtatcaggattgttagtcatctttttaaaaggcaggatcttggtatggagtataggtggctttgaactcactgtgtagcccaggcttagacggaattcacacttctccctccctcctctctcccagcgggtttgcaggcctgtgccgccatgccggactttatattgtatcaggaattggggcctctaggaagttgtcttacatagttgttgtcacacttattttctcttcacagagaaagagagagatagagagggagaggaagagggagagagacagagagggggagagggagaaggagagggagaggacactgtgatcctaaactggaaatggaaagttgaatattaattccctcttcactgtctggaagtctctcagctggggctggggcagggtctttgtttgctttgttttttccttcagtcctgaagacagtggaaagtggaaatacagtatttttctctaccctcaattgatagttgttggaactcatagagtattctgttgaggtggagtgtcgtctttcaccgttagcaggcagtgtgagtggcccactaggtaattcccctaagtagttttcattatctgttttgacacagctgaaggacctgtgagtgtaagttgggcttaatactagtaactcttgctgtcttgtgcagactactatcctgttttatcttctaactacccaggaaagtaactgggaaagaaaaggaaatcttaactagctcactttcatcatgtccagctagcctgcagcttttaagacattgtagcataagcgatctgtgattcgccgtaaagagccaatatgtggtcagcttggttttgagtggtggcaaagttatagctttgaggccatcggtgagcttttgttcactaatgaccctggagggtcctcccagctgtgggaggtgtgggggacatggtaactaggaaacatcattgacagacagctgcattttggctgtgtgtttcgtcaagtcctgtgtctttaacggattttccgaatgacatttgcatcatttccccgggtggtacaattgaattgaggcctacttattttgaaacagttttaaaaactactgaacgccatcattttcagggattaaatgagagcatgggctgctttgcttcggccttgctttgtggaataattatttttgctgttgctactggttctgctactgtctcctcgggagtctagtgaatttttatacagagtgctggtttatgaaatagtatttggaagctgaaagttggagtttttgttttgttttttttttcttttgtccacttttggtaacacatactaatttttctctgtaactgagcaaactagggcaaatccatgattgcttcctgtcatctcattttgtatgtagggcacaatggtaacgggacataggctgcagggcggggctgaagataagagtggttaatgtgatgaccaggatgtaagcggcagtgcagaatgagtgatgtggggggtgcgagctcagcgcgtgagcttgtttcttatatgccctgttctatttaaatggaaacctccgttaactcagaggtgctctgctgttctccatctgatgggagagccttgtatgcaggcaacagcagatgcaaaacccggaggtgggctcattaaggtttctgagtaggcctgtcaaactggaggtgaaggggcaagggcagggatgcagtgggaaagaagttaggatgctctgttagaagtcctggagtctctcttccaggagggtgggctcgggactgtcttctaagtgaggtgcatggccactggtagtcataatccctgtgtaagtattttccagcggggaggggagggggcaagcctataattcctgcagagtgagggggtgggggaggagggctgaggcaggattatgagttggaggctattttgagttacatagagaattcaagggctatagatttcactgttggcattaaatttttcttttgctctgtaccaatacatgtgtttggaaataagtcttttttttttttttttaacttttcttgcttgcttgcttcttctaaagaagagtgccctgctatagcctgaactttctgtgaagaccaagctggcatcaaatttggagtggtatttttgccttcccctcatgtgtgctgagctacctacaggttcttctgccctgcccagatggggtatgggcaggcaagcttttcagatgctggactccagcaccccctccccccttgttcctttccttcccctgtgtgacaactgcaggtggcagtagcaggctgagggaagcagtggcaagtggagccctctagtgttacaaccccaagccagtcttgtgtatagagacccttagccttacaagtgctggtatcagggccttggcttctggcagaaaccagtattaaagctgtcatgccctgtgccctgatgattgatagctttctgggactcctgtgcgagtagggccctcaggttctnnnnnnnnnnnnnnnnnnnnnnnnnnnnnnnnnnnnnnnnnnnnnnnnnnnnnnnnnnnnnnnnnnnnnnnnnnnnnnnnnnnnnnnnnnnnnnnnnnnnnnnnnnnnnnnnnnnnnnnnnnnnnnnnnnnnnnnnnnnnnnnnnnnnnnnnnnnnnnnnnnnnnnnnnnnnnnnnnnnnnnnnnnnnnnnnnnnnnnnnnnnnnnnnnnnnnnnnnnnnnnnnnnnnnnnnnnnnnnnnnnnnnnnnnnnnnnnnnnnnnnnnnnnnnnnnnnnnnnnnnnnnnnnnnnnnnnnnnnnnnnnnnnnnnnnnncctcacatcggggacttcaggtagatcaggcctgaggtcaccctgtgtcttaagctttaggcagttgctgcagcctctgcagcttctttagtagctggcaggaacctatgctttgtgtgctgggaagccaggactagggacctgggtgtgggtgatgagtgggttatgtgagagagcactgctggcttatgggtaacaaggtgccagctgttagggtactcctgaggctactcaacctcttccactgtgaagcggctggtggatgctttgtccctggaaccccggagttagtagggactgccttgggcaatattggttcccagtgccaggcctgttgggcttccactcacctgtgtggtgtttagctgtcaagtctagtgccaggcttcaggctagttttccagtgaaaggttgctgctactgtctgcagtgatgcccctgtcctgtgtcattcctgcggctactagggtagactgttgtacagaagtgggcgaggaaggacgactccagaggatgtgtggtcctgatgtaacagcaggggagatagcatgaggaagtggctctgagcctgttctttaactgttcctctgcagcttgcagtgcagccccacaggcctccaagcctccctccggcagggaagtgctcctcctctgctgggagaaatggttgtctggctgggcattgcacatctactacagactgagatagccccgacgggcagggcacccagcagccagtgcactcggctgcagtcgtggacagagctgtctcaaggcatctgtggcatggtgaaggcagctggtgccggtactggggtagtctttctaactgttagggcagcatccttttctcatggccgctccagcagcaggagaaggcccagtagctgtcaatggggagccaggtttccctgtgcaaacagtgtccttgcttaagtgcaggagtgaacgtcagaaggatgtttctgtttgtatttgattttcctctcaccccattccttctgtaacagcgtttaaacttaccagtgctgtgagaagaacatctaatctgtggctttagaagttgctcaatgtatccatgcacctgctgcgtttattaaaccagttctccgcagttcacatccaaactaggcagactacagcttagctcccagcggatgaccctgtctgtgtaccatgtctctgttctgtgtaagactgctcctacttgggcagtgtgtgcgcctgtagtctcagtacttgaggggttgaggcaggaggattactgtgaatttgagaacggcctgggatacagagtgagtttgcggttgacctaggttacataatgaaccctagtcttaaagaaagaaagcccaacaaaaatttttttgaatgacccaaatgtcagctgtttaacaatcaatattacctgataatttttatcttgtcagatgtctgagtagcttgatgtgttacttctgagattgtggtcaggtcagggctgggatatctgaagcttcaggtggggaagggcttgctgtctaaatccctccttcagggtgccgacagggtgtccttcccccagcgttgttggactggggccttacttccttgctcactgttgatggaggcctcacttagctctttgtctttgggctcacaagaccaactagtaaatatgcgttccagacagacttgggtagtttaattaatgattattgtaagtagaatcctatctggtcacctgtgtcatcattagtgagttgtaagtgtccagtttattcttcattaagttcaaggaatgaggaatagcttggcagtgatggagcacacctgtaatcccagcattcgggtaggcagagtcaggcagacctctgagttcaaggccagcctggtcttcagagtgagttttccaggacagccagggctacacagagaaacccttgagaaggaagaaaggagggagggagggagggagagagagagggagggagggggagagaaataaacaatataatttatagcagtaattaagtaatcactgagctatccccactctgtgtgtgagtgtgtgtgtgtgtgagtgtgtgtgtgtgagagtgtgtgtgtgtgtgtgagagtgtgtgtgagtgtgagagtgtgtgtgagtgtatgtgtgagtgagtgtgtatgtgagagagtgagtgtatgtgtgtgtgtgtgagagtgagtatgtgtgtgtgtgagagtgagtgtgtgtgtgtgagagtgagtgagtgtgtgtgagtatgagtgtgtgtgagtgtatgtgtgagtgtgtgtgagagagtgagtgtatgtgtgtgtgtgtgagagtgagtatgtgtgtgtgagagagtgagtgtgtgtgtgtgagtgtgtgtgagtgtgtgagtgtgtgtgtgtgtgtgtgtgtgtgtgtgtgtgtgtggtgttgtgtggtactagggattggacctgcagcttcttgcatgctgggcagatgttccatcactgacctgtgtcactggcacgtccccttcccctaacttttaagacagagttttgctgagttggccaggcagagtttctgcccctcagtatgttatgtttctaaaatgcacttctaccagtgattgctccttaacacatctggttcagtttaaacttgcctggttgagagccagttatctttaaatatacaacaaactaccatttagtaggtgttgcctacttttctttgaactttacttgaaaatttcctttgacttgaaatttcctttgggctttaattgaaaactttaccatgaaaaatttcagattgataaaaatgatttgggtgaataaatatgtaccaagctgtcacaagctctcctctgttgatggacagctaggttgattccattttcctgttaaagtgagaagagcccatctgactgtggcgggatctagactccttgggatatgcccacgagcggggactgggtcataatagttgtctctcgattgccgagaagctgccactcgagtcccacagcggcttcatagttgacaccgcagcagagtttgctgtctttagttttcctgatgttggccattgtgagtggggtaagagggaatctcaaaatagatttaattcacgtgtgtttgccggctggttagaaataatcaacacttaaaaaattttatcaggttttatatttcttctgagaactgtgcgttcagaggattgattgacctatttgtttcctgccaatttcttgtgtgtatgtgtttacttttgcagttctttaaaaattatttttaacttgccaaaaattgtgaatatttgtggagatgtagggttgtgtctaagggtgcagtgccgtaggccagcaaagaacattgggtcccatggggctgggactacaggcagttggaagccactcactggaggtttggagaaatgaactcagggtccctgtaacagcaatgaataatataccatcttttttgtttgtgtgtgcctgtgcctatatggctgtatgtgtatctgtgtgtgtgtatgtgtgtctgtatgtatgtctctgtgtgagtgtatgtctgtgtctctgtgtgtgtgtctctgtgtgtgtacgtgcctgttgcatgcataaatgtgcacatgtgtgtgggatgcacaaccgtgaagtgagaggacattgatgttttttcatcaccctttgccttattcctttgagactgggattctcaccaagctcagggcttagtaatttggggagctggcttgccagagctgctgacatcctcctgttcccaccccacagcccgtgcgtcacatggtcactgttgatgtcctgccaatcatgcacagttggcctgagatgttgcacattagagatgaaatgcatacaccattctgatttagagatcgtggccttccctctgcctttcctgctgcatatcggttgctgttgttagtgagcagagacaagcacaggggttagagcggatctcgagagcagaaagctgctgctcttcctaccgtacagcagtagactaatagacacgggaactgcagagtaggagagcagtgggatgccaagtccaaacagaagagctaatgaccagaaagggggttaatattttggcttgacttaatttttatcttaagcattttttttaaattacctgaaatatttgaatatgtagatttgactgcttaaatgtatggtttatgtggaaagagcagtgtttaatcttccagaccggtcatgactctgcttcccccatgtcttcagggatatcacgtatgagatagcagtggaggccatctcggcaatggttgtcttcctttcctgccaactcttccacaaggaggttctgcgacagagcatcagtcacaagtacctgatgcaaggcccatggtatgttctgttttaacgttgtccttcataaggagcaaccactgtgattttaattgttatttcttttcatgggtgttgtcattttaccaacctgccctcccttcctgttctgttggtacttcatccccaacacaaggtgaagccacagccgggttcctgtccctctgtgctctgcctcgtcccccagttcatgggtacctgtcatagttgctttatgcagcaggctgctgtcatctcttccttcttcctcctcccctgtcaagtcctctctgtatattccagctgcacccaagtcttcctctttctccagctccttggaatctagttgtcctttggtatctgcagggaactggctaggataccaaaatccgcaagtccctaaaacatcctgtatgtaacccaggcacatcctcctctacgctttaaatcctgtctggatgacagatagttcctaacacaatgtgaatgctttgtaaataactgatatactgaatcgtttggaaaataatgaggagtaaagttaagtataaataagatttttttttctgagtatttaaaatttgtgattggttgaagtagtagatgcagaatctgagactgtgttctttgtgaatttgaagggctgacttctgtggtctgtgaccttttgttgagcctgccagtggccccttcactggtctgatttaatgagcatctacttatttactgtatgctacctacatgttggccttcctccgtagcagacacttatgggaacgtggctaaaaacactttcagtaaacacagcaccctaccttctcttgacataattttcaaaaagctttaaatcaagcaagtctttagaataagttagtttttgttaaagttatctgtaagttctagggatgcagctgtgggtagaatacttgtcaattgttatgagtgaaggatattgtccatagcactgtcctcgccttgttaccatggttacactacagcatgcatgttcacaggctcccgtagagccctttgggtaagtcacacaaaaaagatgcccaatgcccagggttaagactgcatctggtgaccttcttactggagactcccaaggtgtcactgggccttgtgcagcaagagccaagccagtgtgtggctctgtcttactgaaaagctactgggattgatcatgtgagctccagacttaccttctgacgtaactgacacgctccactgccaaacaccatagtgagttttcatctccaccatcttcctgcctcgcaatgaggattgaactctggtgtgaattgtaaaggagacagaccataatactggagcctgtgcaggtgacatttgaaagtcactgacaagaaggggaggcctgggctttggagacttctctctaaaccctaacagtggtggagtaacctggcctgcaggttatggttggcatgctagagttttgactagaactgtatttgttatggtgctagaaatataaaggttgtattttccataggtggggaggacgttagtagtcttactttgttagtctttggtttttgtagtgtcattataatgacaaatacttaagcagaatatttattgtcataaaagccatggtcatcaataatacatgcaaaaatctacaagtggaccagagaatatagaaattaccttgtcaccaaaaattgaataagcggagttttgcgcttacaacatgtgtctcattgctatttggttggcacattcctctgctgatttctatgtagcaacctgccttcagtagccagctgtgctgcactggccgttacatttataattacttacaattctatgtaagtgacaagcacatgcttatgcttaatggttggaatcgtgctgtctggtgtggagacagcgccagggtcaaggtttgggtcaggttgtgagatgctcacacgttccctgaggtagtcctagggacaaacatattctgtggtgttgtgcagaattaggtgactctgtgaacaggagtttgattttaatttttttttttttttttaccctttctatgtagtcttccctacaccagtaaacttgtgaaaaccttattgtataactttatcagacaagaaaagccacctccgcccggaacccatgtcttccctcagcagtcggatgggggaggactgctgtatggactggcatcaggagtagcaagtaagtccttccgtccttcacgtcctctgtctgtggaacctcttctgattggccacacgcagttctcctcacttggttgctgccaggagccattctattgagtctgggtagctggctaagtgtaaaagtgcaaaggcgttaaaatggcaaccctcccattctctgtagtgattcatgttaaatgtatgcaaataatgagtagattatttagctgtagaacataattgttcaagacgaatgtttatacgtaattatggatatcatgcaaggtctggctctgaagagaaagtaacatcaagccgtcggatgcttttcactcggtgcctgtaggcaacatctttctgttcagagactccattggctggggtttcactgcacaatctcagagctttgttcagtgacaaattggtagacttggaagactttgcagctaactctgcagcagcgtgggatggggttgctgaagaaaagccctttcctccctcacagtaggcgtcgtttctgccgcagagttcagagctagaggcagggctagcacgaggtgccttgggcttccttctgagaatagaccaggctctgagagctaacacagctgagaccgtgggctctgttataaaggaggagtagtaactcgacatccgggtagtctcctgcctgcagccgagcaagcagtaccttggatgggggtgggcagcacagggtggcagcttgctctaccctggggcttgccagcctctcactaagaagtctcaggcttgctctgtgagtcaagcaactgatgagtaagctgccagacttggtagttggcctgcccttggttcccatgggatcctgtgttaaatccatgtgttgtcgatcactcctcatctctctagggagccagcctaggatgccacagtgcgccgcttctgtactgtgccccacacagcaccgcttaggtgaggcctccttctgaaggccacatggcagtggttttctagtctctccgggacacagaactgatctcttggtctgtccgtccgtctgtccgtcnnnnnnnnnnnnnnnnnnnnnnnnnnnnnnnnnnnnnnnnnnnnnnnnnnnnnnnnnnnnnnnnnnnnnnnnnnnnnnnnnnnnnnnnnnnnnnnnnnnnnnnnnnnnnnnnnnnnnnnnnnnnnnnnnnnnnnnnnnnnnnccctcccttccttcctctcttcctctctctctttctcacctttctggtgtgagtacttggcatctgagtttttcccaatattctaatgtagctagagacaagttcattagttactttcttcaaaacagtggtcatacttggtagatttttgttgttgttgtcttaaacaaataaatttggtgccattagttttctgagtgcagaatccaggccttttacaatgtagatagagcccacacagcaggtactcctccactctgctgtctcccagctcaggcttacagacggtgtggttggacctttcctgggtgtaaacagcactggctttgtaccattgtatgcattgtgtgcttttaaaaattacttccttcaaaacagagtacattgtcttaaaaactcagtttgggatagtgatggtggggttggtcttgtgctctgtgtgttcagaggccgagttctggaccccgagtgagatcaggctgcagtctgggcatgggcattgtatcagccagtgtgctgtgaagaaggctccgcagtaatccgattggacagtaaaagactggagcctgagactggccaggagagagacctgagatggagtagggggtccacgtagatgcgaggaagaggtccccatgaggcaggatgggccatgtgcatgtggccaagagaagatcgccctgaggacacacatggagcagagcaaatagagcaagagtcggctggcaggtaactcagggcctgtggctgggatgtaggttagatagctcagaacctgccctgtttaggattacagctcattaatgaaaatactgggtttctgtgtcatttattctggaatggggcagactcctccctcccccataaaattacttttacatagtgcttttgttaacactggcagggcaagggcctcggcctgagctctgtgtgactctgcagcctttctggttttcttgttgttatccttcccttcctaacttacattaatggcatgagtgggaaggctgcttgatttaccaactttctggactggctatcccaggctgacctctaacccataatcctcctgccgcagctttctgagtgctgagacaacaggcaggcacagccacacctagctctagcataactaaatacttgataaaattaaatactaaaggctaacatgtacctgggaatggtggccatcttgtctttaattccagaattcaagaggctgaggcaggaggattaccagtaatttgagcccagcttgggctacaaatgtgaggtcttgtctcaaggacacaaagagcagcagccatgagagccaacaaccggtttgtgtctgtgctgagatgtgggctttgtcatcacagcagtttccgtcactgtctgactcctgcctgttttctctgctttccctgtgtgatcccatccacttgagttttctttgctcgtgttttactctgtgcagtttcaaggctgttcagcggtagagtggtgggatggatttccatccatcgagagtctccagggatgatcaacatttgctggtttacattgtatctctctcctcactggtaaaagaaatgttttaccaggaaatcagtttacgcattcagaaaacttccaagagcacagcagtacaaacccacttctccctgttccccactcttgttttccattttatttgctgtcattcgccgtcatcgtcactgcacttcctctttaaggcacttgtgggtaggttacctgcagcgcagccttcctccctcaggggcatctcttggacccacagtgtagctgtggtgactgaggaggggatcattgccaacgagtcactcgtgaagaaaggaaagaagtccctttacgaagtgtggtttcatttaagtgttgcacttaggttttgttttgtgttgataatgatcttatgctagctagcccagtgtgccggcactcaggcactcagtgtgcagtccaccctgagctcacatcgttccccagcctctcaagtgttggtgactggtgtgagccaccgccctgatccacagttaggttttcttgtaactgttttgccctcggtctctcttctgactccgttcctgcttgtcttcttcctacaacagccagccgctctcccattcctcaggagccgctctcccattcctcaggagccgctctcccattcctcaggagccgctctcccattcctcaggagccgctctcccattcctcaggagccgctctcccattcctcaggagccgctctcccattcctcaggagccgctctcccattcctcaggagccgctctcccattcctcaggagccgctctcccattcctcaggagccgctctcccattcctcaggagccagggccgtgttggctcagaggaggaaaaaacaccatgggaattgctcatacagcaaagatacaagtagaatttttgtttgtttctgttagagtaatgacaattcacatatagttttttttttaagctttttcagattcattgagtgcgatttcaaaaactggttggaatgaattgtaaattaatataatactttattataatacatgcagataaacatatagtcatagttttagagtataagaaattatttatagcactatgccgccagtataagacaaagactcagttgatgtatcactgttttggaatgagtgctttcattttttaaagttaatgtattattttaaatttgcagctgatttatcatttacgctaatcacagaattctagaatcacctgatatactttaaaaaatctattcatctgtctgcctgtcagcactattagatcttggcattcctaatccatagatagagtgaggtctggtgctaacatagagttatttttaattgtgtgtctgggagcacacacatgcactcctgcggctgggagcacacacatgcactcctgcggctggaagcacacacatgcactcctgcggctggaagcacacacatgcactcatgcggctgggagcacacacatgcactcatggcgctgagagcacacacatgcactcctgcagctgggagcacacacatgcactcctgcggctgggagcacacacatgcactcctacggctgggagcacacacatgcactcatgcggctgggagcacacacatgcactcatggcgctgggagcacacacatgcactcctgcggctggaagcacacacatgcactcatgcggctgggagcacacacatgcactcatggcgctgggagcacacacatgcactcctgcggctgggagcacacacatgcactcatgcggctgggagcacacacatgcactcatgcggctgggagcacacacatgcactcatggcgctgggagcacacacatgcactcctgcggctgggagcacacacatgcactcctgcggctgggagcacacacaggcactcatgcgctggatcacgctcgtgcacctgtggaggtgtgtgcgtgtgtctgtctgcctgtgtgctgtgtatgcatgcaggagcaagaggtgtggaggtgtgtgcgtgtgtctgtctgcctgtgtgctgtgtgtgcatgcaggagcaggaggaagtgttggctatcctggagctcgagctaatatgtgttgtgagcctgcagatgtgggtgctgggaaccaactctagttctctagaagagcagcaggcgctgctgactgctgagccgtttctgcgtcctcagtccctggctgctaaatcgcactgactgatttctaacacgcataaatgggagaccgtttgtcctgggtttgtgaggagtggaagagataagtgtataaaatcccacctaagaccatgacatctgtcctcgtgcagatgacctttgctgtcagtcctcacgctctgctggtgtttggtggtgaaaacagtagaatggtgtaaaacagaatgtgaatggaattttaattagaaacaaccagtgatgagagaaccctagggacatttatgttaagacagtgttaaaactcagggcatctatgtttctggtctgcttaaactttaaatcatgtaaaaagaaaagttttaaaagaccgattaatgaatatgcctgccacattcttgctttgtgtccagctggctctttgttttatgtggtgcaaaattttgtcagtgacagaaaggaaaatttgattattaaatagatatttccacaagaaatttgttccttcctaagtgaacttaccttgacaacagttgccatggtaccatttcgactcctctgaggacttttatgtttgtttcttttgagtatgtgtgtggaggccagagggccttgggtgtcctcctcaggagcagcttaggctaggctggctggctcatgtgtcccagggactacaggggcgaaccggtgccagccttgtatgtgggcattgtgtgtggaactcagggtcttgtgctcacaaggaaagcactttgctggctgaactgtcctcccagtgctgttgactataaaattagcccaaatgtttaatagagaaaatttgatgctgactcaattcaaattataataaatattcaaacattcatttaacccacgatatcattggtcttggtaaggcaattgatagctcttaatctctaagcacatcaccctatgctgttaaacatgtattataagcctgtgaccctcatgtccacaacttgttatgtttttaaagtgtgtcctggcctgaggtcgccttggcagccttaacaactgctgtttgtttctcatgggtttagaacctacaagtataacgtcaagatgccagcaagcttgcttcttgatgtgggtcctcttcctggcttgctgttctctcatgggaaccagaaggctttgtgtgacttcttacaaagtcactgtcgtacatgggggatctgctgtgctggcctcttagaaacatactactaccaaagatccattttctgattctgttccttaagagaactttaacatctgcttttgggggtaaccgaaaatccctccatagccaggcgtatcagtcatttctgtgtcactgcagtgagagccgggcagctgctttacaggacagagagggttattctggttcacagttgtggagattctcaagtccaagacttggtgtgctggactagccttgctggtgcagtcctgggccattacctgggaaggggcagggagtgcccccgcctgtctctttttagcccctttttcatgaagacactggtgcttagtcttgagggctccaacgttatggccccatctagttcattttttctacagccatgagcaccatagctggattaagtttccatccatcttctttctatcattaacataacttggttttaatctcccttgtgactcagaggacagccatattcaaaccctagctacatatcaagttgactgagctggattgcatggtggtggcttatggctttaatcctagcaaattgtatgatctatcttgtgcgatgctagctggggccgtgcttccagtcaatcattgttttaaaccacagcgctgcttagtgggatggtgagagttgtggaccaagtagatcaatctcaatcctaaacaccaattacaaatccaaaatggatatttttattttctggctttggatatttacattgtcagtatttcgttttggaggacaggttctagaatacgacaatttgccactcattgttaacagttgcaagcactgaactctggatgtacactgggtgagcaagatgaaatccaccctttgttagttagcatgggtgtttgagctctcatgtcctggtacaatgaggatggcacacgtgtgtcttcttatccacactctcacttacctgaggctaactgaaaaggccactgcaaaatcccagaaataagcagttggaaattcagtttatattgaatgcagtatgggcagtgcagtcaaagcttgcactgttgttctccggcctgctcaggatgtgactcctcccttcccacagtgtgtctgctgggtctggtagcacccatttgtcactgtctttagctattcttccttcttccacccttcttcaccctttttcttgcaccctttcagccccctaacactggatatgagagaaaaaagggtagaaaggaaaggaaagagatcctgaatcgggtcggaaagggggtggtgttatctgcagactgcttcctgccgaataggggcgtgagttccttggggcaagtttgatcatcaccatcaggatatctaatttcttcttgtttctttgtgatcaacaataaccatcaacctaccacttgtctcgggggccctacatttatataaatccctttataaagtccctagaattccaaatgtcacacaatcacagaatctgtctgctagaacacgatgcaaatcatagtcagctgctgtggacagtctgaagccaccccatatcccacacctgggattaaaatgaaaacatattcttacaatatttctgtgttttctaaaagaccccaaattccaaattctcactacacctgtagtagccattttagaagcagatggactatcataatcctagattcagagaactctacttaatgatgttccttagttgtgatggacaattgcaatttgggtatgctaagcagaaaccatatttgctttcctcacataaaaacttttgacttaataaggaaagaaaaatggttgctaagagctatgatgaaatgagtgtggatttatgaagagaaaggaagagctgcagagatggttcagctgctaagtgcttgctgtcatgtgaggcatgagggtgtgagtccatgctcccagcatccctgggcaacctggcacgactgtgacatgcatgcctgtaactccagcactgtgtgtgtgtgtgtgtgtgtgtgtgtgtgtgtgtgtgtgtgtaaaatcttagtaatgcaagtttcgtaggatctctttcttcaagcattcttctaggggcattagaatacacccctacccatgatgggaataatgtaccttcctctgtggacagctgagaccaggtgagtaaatgcatgaaagaggcagtcaccacatagctttacaatgaatggccactaattataacatataacccctagtaatatggaaactatagtatttaaaaatcctttgctggctgtggtagcataatgtcagcatttgagcgtcagaggcaggtgtacctctgtgagtgcaagccagcctgtagcctgttctaggatacccaagccagctgtagcctgttctaggacacccaagccagctgtagcctgttctaggatacccaaagctgcatagtgagaccatgtccaaaacaaaacaaaaacaaacaaaaacccccagacaagaaactatataatgtacaaacaagcaaaaacaataaaaatatgttaaaaattgggcctggagagctggctcggcagttaagagcacactggctgctctcccagaggacccagggttgattcccagcacccacctgacacatggcatgaaagtccaggtccagtgatctaatgccctcttcttaggtactgcatacatgttgtgcacagacatgcagacaagacatgtacccatatatatatatataaatagaacaaagtatgaccttacaatgatttacaagtttgctttggttttttctatgtgaataacttaagaaataccagatgcttgacatgtgtatttgttattctatactatatgtgaagtatagtatatacaatcatgctttgcttaattgcaggccatgtgataagaaatatgtcatattttaacatacaaacatcaaattatacttatacaaacatatattgtaggcttagatttttcacaacctactttaataagggttcttaaatgtttaatctcccttctagtccaccatccaacaaaggtagtgggaaagaaaggttgttagggcagagggggatgtggacatgtttagaaatagttctttgaggcgattccaaccttcattgtcagcattccagttctctagcagaacaccaatacgaatcagcagtgcagtcaagtccacttggcaatcaccactcactaatcagcaaaggcaatttaatccagaagagaccgtgaggctctgctaattaccctgagtcactagaagcggcaagaaggctctggcttatcacgagatgttctttggtgagtttctctctacaaagtcatgacaagtgaagatgagcagggtgatgcaaagcaaactagaacttgagcatagtcatcgaagaccagtggggaaaactggttcatcaagagacacagcagcatcacatacagaggcattctctttataataagctttaagtggagggagtataatggtaaaacagtgatacagtgtatgtttagcaaatgtgtaaaccagtagtatagctggcgatagcatgctccaagcatgatagtggctgtgtgtgacggttacagcagatgcttatgaaagcatcgccacaaacataaacatggtgtgctcaggtccgatggctgcgacgtaactaggtgctgggaattttcatctttgacattacgggaccaccattgtacatctggtctgtcattatgcagagactcagggttgccactgaaggaagtccactggagaagaaatgaatagtgaacatctagttacttctgtgtctgaaacattgttcatcgggatgcgtggctttgcagtttgtgtgcttcgttatgataaagccgcactgtcattatagttgggtgtctaagccggcttatgtgtactctaccacactgcttccagtccagtctcaggttttatacagtggcttctgaggaacgctttcccacttgactgaaccatcaaagctgtttcatttcacttgcttgtagtggccagtgtccacagcagattataaggccaagtttaggaaaatgtagtaacagagaagttaataaagtcaaacccaacgttcccacctctgcttcccacagccgggtatggtgacacactcgtttgatgccagcacttgggaagcagaggcaggcagatctttgtgagtttaaggccagcctggtctacagattgagtttcagaacagctggggctacacagagaaaccctgtctcgaaaaacagagaaaagaggtgataacacaaacaacttttttttttttaagatttatttattgttatatgtaggtacactgtagctgtcttcagacacaccagaagagggcatcggatatcattgcagatggttgtgagccaccatgtggttgctgggatttgaactcagggcctttcgaagagcagtcagtgctcttacccgctgagccatctcaccagccccataaacaacttttattcccccgactgctgttctgagagaattactgagtgaaccatgcagactgtggcgctcagtagttggagcttatcttatgtgacggttcttttcccccagtgttggctcctgctcagtgggctcattgagagaaagtgtgcctcactgagaaacacgcatcaccgcaaaactgacagactttcaatgatacatctcgcacgtcacaagagagggctgggtaatgatagtggtgcgctttaatttttatttggaatgctctggtatactttattcaacaagccaaagaataaccctttgtttttgtttattttgtttttttttttcataattaaattcatctatttataaagtgaagttaatttcaggttactgtttgcaatagttcaggaataagtaggggccttattaaagtaagcttgtaattctagtagtctagatgtcttggaaggcattattaaatgatttttttaatgtgtaattgggaatcaccatccagaatctaccttagttttgtaccttccttgagagggttacagcatgtccctgagggggttccagggcttgccataattaatgttcagctaaaatacaaggtgctttttgctttattagcacaagttaaaatctgtacattgttaataaggagcatactaatttttaaattgaaatgaggtagggtttatgtttcatgatctggcagagcaggctttcaattcttacaaatgtaacagtttccactggtgtacttcattccacacagtgctgggttctataaagacgctctgtacacgtttaagatggtaatttgagcgaatccacgtaccttttttccctttatcaccctttttcttccactaacctcctctgatccccaggacactttggtctctacttttatgccatgtatatgattttatgcatctgtatgaaatcttggcgccacaggagagacagtctgacatttgagacaagtttatgcactctgattatgtccggctccatcattatccactttctcctctccccacttctcctcaccaccactgtactggctggttttgtgtcaacttgacacaggctggagttatcacagagaaaggagcttccgttgaggaaatgcctccctgagatccagctgtaaggcattttctcaattagtgatcaagggggaaaggccccttgtgggtgatgccatccctaggctggtagtcttggttctataagagagcaggctgagcaagccaggggaagcaagccagtaagtaacatccctccattgcctcgacatcagctcctgcttcctgacctgcttgagttccagtcctgacttccttggtgatgaacagcaatgtggaagtgtaagctgaataaaccctttccttcccaacttgctttttggttgtgatgtttgtgcaggaatacaaaccctaactaagacaaccaccctttcttttgaggtaagatctcttgtagacaagtatggccttgaactcctgaaccaagcctagctaaatttgttctttatgtctgaaaagaaaattcagttgagcatatatgacactcagtcctttgttgatggccacttaggttgattttctcttcaaaggaaggagtcagtgatgaaggtatctttctgacatgttttcttggagctgttttgatttttctgttttgtgatctgttgaatactttgtaatggcagtaataacagcacctactcggttccatcttacaagggaaattgatggcccttttcgtgccataaatcgttggggactaaagccatttgcactcaccaggaacaatatagagtaaacggtctccaactgcttgtaggctggaagccgggactttattttctctgtaccgttcttcaagatggtggataaaaggtaagaagcctgacacaaaggagcggcagcctgcagccatggctggtggtgctgtggctgctggtacagccataaaaggtgacccttaggtttaaaagccaaagaaggggaaccccactacagcagaaactctggcctggttagggaaactggcaagtgcttcctggtctcctctgtattccagagaggccccagagaaaagaaatacttagacacaaagtctaagttagaaagagaaagaggagacccttgctgctgtcacacaggcagctggtgatgataaggatggcattacccaggactaagcttcacgggatgccctggacctgggtatgttcctgctgaagatgtgtgccctggacctgggtatgttcctgctgaagatgtgtgcctaggacctgggtatgttcctgctgaagatgtgtcttggaaactgacacaatcatggtgaaactggagaatcatggcgaaaagcccttcagcaggtatgtgagaagactgtgtgcgcgcatcactccttggggcattcctgatcaccctcgcctggcaccacaggggcaaggagtggctttcctgaagcagcagaccagtggctgctacttgtgactcgacctcttgtcttcagctacatagaacaccctgaaatttgtcatttccacctctacaaatactagcaaggttaattaaagacgtttaaaggcagctgtgttcttagtagtttagccagttctcggtttgttgctgcagtttgttcttgatgtgggctgtatttcctgcattgaccgtgggaaaggacaggttatgaaaggactcagatgtccatctcaggtaaaagtggtgcatttggggcctactaccaaggcttttagtgaatatgctgtgtgtaacagtggcatactcccacattgtagctgaagacatgagcgccaggcttagcaagcctaagcctgcctctcttggaagcaagtgcagcctgtaaagggacatgcgtagaagtggcacaggtggagggacaggtgcatttctaaagggttcgtgtgttcttccctccctggctgacttgagttcagctgtgattcccggtgcttgcttagccatcatgggccacaaggaaccccaagaaggacagtcatgtacagagaggccaaaagaggaaaggaagccagcgttcaagagttgtgagggagcatgaacaaccacccagcaccttcctgcagccaccttttcacaactctccccagtcccagcttagatactgaaggcaggctggggcgtgggtgtgctgtgtccctctctagggtggctggtgtgagtgtcctcattagagcctattgagagtggagaagagtgggagaggaagcacccagaacaagtaaaggaagacacaaagcagtagatttctcaaactttttcactgtccacagacagcgccttatgagcatcgttgtcattcagaactcgcgcaaggaggccatgagaactgttcccagccaacagtgagccagaatcatacatgcagcaaggaacacatctgggctcttaggtctttataagttcatgtgcttttgaaattctgctttggcaaacatatctccccccctccaagataattatgtgcaaattgaatttctttatttccttttccttttgttttgttttctgaaacagtatcccactttggagccctcgctgatctggaactcacagagctatccacctgcttctgcctcctgagtgctgggattaagggcatgcgccaccttgcctgactctattaactacatgagagtctttgtgtaagattaatggcgcaacaaaatgttgtttgtgtggcctggcttattcctgacatgagcaagagctcatatttcccatttaaagtaacgtgatatatgtggttggaatctactagaggtgggtatgggtgggtctgtctctctgtctcccagcttcactggaatagcccttggctggcctggaactcactgtgggctgacctctggcttgcagtgaccctccctgcctcagccttctgagtgccagcatgataggcttgagcccccatgatggcctgcctttccctctgcttttagagtgatgtagtattcttaaagcacagatgttgtacttaagctcccttgttctgtgaccttagaagggtaaatgtccccaagtctgctttctgttaacttttgtggcctgaggctttagtctcatgccttctcttcagtgtttccctgcactccatatcagatgcaccctgcgccaaagtctacgtgtggtttttaaaatttacttctgtctcttctgtatgctcggtgatttcctcagattcatacttcagttcagttccctgacacctcttcagctgtatctgatacactggaattctggttgaagtttctgacatttaaatatacacacaacaggcagaagtgtctgacagataataacgtgtaatgaaatgtaaaccctgctgcccagctgggaacagattacgtgagatactgagtaaggtaaggatttaaaatggtgtgctgggtgaggtgaggtgaaagttggctagtttgtcatgggtcctttctttggagtgctgttctggaaggtcactagggtagactgatgggaaatggtgtcagagtgccacgcctaatcctgattgtggggagacaactgggtgtgttgtttgaggcagctccagaagggattaaccaagtggggcaaacccgtcctgaccatgaatggcaccatcccctgggcacctggatggaatgagggaaagaaggaagtgcactggaggacgaacattgggggaagcgagctggaggaaatgcattggagggcgcacgttgggggaagcgagctggaggaagtgcactggagaacgtgcactggaggaagcaagcaccctcctcctagtgtgccctctgcagtttgatggaccatgcctctgaaccctgaggagtcttttcttatttacactgtttctcttaggtatttgtcaccgaaaactgaccatctcacagggtataggcagagtcaggatagctagaagtatttatgaagcagttgccttttgtaggccttatcattactgatagagaagtgatgctcccgaggaaaagaagagatggtctgtctcctgtatgataggagcaagggccgagagctcgtgggttttaaagaaggaccttctctttgaatcaagttttcagttagcacaggtaagcgctctgcgcctggaggttgaggattactttggaagttgaaagacagacacaggagagacagtggcccggagtggggatccactagagatccatcacacagttaagtcagagcaagcagagcgaccacagcttgttcttcggttgtgtgtacttgctgtaggacatggtgtcagtggagtagtgcatgcggtcaagatcaagtgtaggcttggaaaggaatactcgagagggacacctgcctggtgcagagcccgagcctccaggatggctgaggacgagtgcacagcaaggctgctgacagagggaggggaaaagctatctgagtcagggaccggaggaccgccctgactgcggcctgacgtggattcaaaactgcattgaagtgcagcagttagttcaggcagccggtggccatggtgtgaattagtaaggtgcgtgtacaggcagcctgtggccagggcgggactaggaccacatttttgcatgaattttttggggggacgttgaaatgttttaaacaaggatggttgtgtggaggatcagacagtgaagtagttgctgacgttataaatgtgcaggagtgctgctgactgccagggacagagcaggaaggtgtgagggggacagtagtccggtgagatgcttcaagggatttgtgatgtttgaggaatgatgctttgcaggcagtcatgtgaattctgcctgtaggagcgaacacacatcactgcttgagaggattcctgagaaagaactgtcctggggacactcagctagcttcctgtgagtccagggcgttcaaagaaacagactgaaaactcaaggttttctgatgaaagatgtctgttttagaaggtgtcaaaggactgggatgcggagacatgggggtgtgcatgccatgtggctctgagcccaggtggatgcagcttacgactctgttggccatggtaactggtaatatacggcatcgcggatgatggtcttaatctttcagggtagagtaaataataaatcctacttgtagtatgtgacaatttgtctttatgaggttgtcgatcccttggccagggaagtattcagacctctgggagcctgtcttattgtgtggtcagatctgtccagtgtaagaaggcatggctttaccagttatgaatcactgtacccttgtaggttagccagaaaacccacaccacattcattcatcatttctaagctcacttaatcatcttatacattaaaaagctagagctgctgtgggtctgtgtcttgccccactactggggtgctgggcagacaagagtggagatgttaggctgattttactctgggctgccactgtcgggtgctggactacagggaagcaccaacacacccctcagggggccggaaaaacacagtctaacatgtgggaggctgaagctggggcttccaagttcccaggtattcagtcgctgttggaaaaccacacagaggagtcgaggacaaaggattagaggtccacgggcctgcaatgaggctgggcctggagcctcccaaattcctggacatccaggcatacatatgtgcaagacatacatacatgtattatctttataaaaattgtaggcatttaaatatagtgacagtaattcattacatcacaggacaatctgggcaagacctccaagagtataacatagtgtttgttgaaggaatgaagcacaagtaagggccattcgttaggcgaagtcaagagatataaatgcagtgctgcaatgggcagagccagcaaaacgcatcaaacggaaacaccactttcgccgtcgtgaggtctccctttcctcgggggtgtgggttctgtggagcaggaaggacagaggaagggtcgtggttgagagagcctcctctagagtcggaacattagtgtgggtccacacgtgctgtcgtggggtcgggttcgagtgcttctcctggaaagctgtgttaatgcggatgcttacggagccttcttccatgatgtgtgtgccattagctgggaggatgctgctgtcgtcaccttagcttccttctttctgcccaccccgccccacccctggtcccttgagtgtggcgtctttaagctttattgattctctatcctatcagtgtaatctttaagtgaatggcttgtaaattttatgatgcattgttattgtgacatcataagacctgcctgttgacatttttcagtagatgagattaataaaaagtttaaagtatttaaaattatgctatcaataagactgccttttgatgtaaatatattagtaaaaatttgggaacatttttaagtgtttgctaattatggtgccttgggaagtcctgtcacgcgggactgtgtttcttactaataaagggagctaagtctgtttcagggtcttggaaatggatgggaaacagagaattggtaatattttcttttttttttcttttttttattaggtattttcctcgtttacatttccaatgctatcctaaaagtcccccataccaacccccccaatcccctacccacccactcccactttttggccctggcgttcccctgtactggggcatataaagtttgcaagtccaatgggcctctctttccagtgatggctgactaggccattttttgatacatatacagctagagacaagagctctggggtactggttagttcataatgttgttccacctatagggttgcagttccctttagctccttgggtactttctctagctcctccattgggggccctgtgacccatccaatagctgactgtgagcatccacttctgtttttgctaggccccggcatagtctcacaagagacagctatatctgggtcctttcaacaaaatcttgctagtgtatgcaatggtgtcagcgtttggaagctgattatgggatggatccctggatatggcaatcactagatggtccatcctttcatcacagctccaaattttgtctttggtaatattttctttgtttttatcttataaaaagataacaaagaagcccacattggtaatcagagggtcagctctgctgggtcttatgcccttgtaatgaacatagatggctactctttttcaatctttgatttcagtgcaagacattttaaaaaaagtctgtggttccactggttttaagtagattttttttctttctgagaactagttaaggctgggcaatcttacaaacgccctgaaccacagtgggtttcattatgctgaaagggaaggagcgggtggggcccctgtcctcttccctcaggaaacctggggtgccatgcgacagtgactttggcagatgggctgagggtgggcgccagcgccagcctggtaatgctttctgttcctgggctcctctctggcctggttggtgtctgctcagggacctgcttgttcattcagtgctgtcaggataggacgcaaccccaggagccttctcaggccccctgaaaccttgtcttccccctcctccatgttacatgtttactacacgtcattttcatttgctgattgtgtcttggtaacctctggattcattacttttaaatcttctcttttaaatctccgtatgtgcctcccatttcaaagcgtctactctcagtgcctctccggctttcctcccagtcctgcctatgtagaggtggtgctgtagctgcctttgttagggcctggctcagcacacttcagaggctgtcttcccgctattgccagcataactgggatggtttggagaaaattgcagccatctttctctgaatgtgccttgccttcagggagtagaggttactggggccctcctacctttgcccacagtgatctcacgtggaacctgtcctggcccttcttttcatcaggaggcagtgcagaaaaataacctaaaagtaggagtgctttgtcacgcatgcaggcctttggctggtgtgcattcttcataagtggtatgtaaatgataacgtaagcaatgagaaaaattgagagtggaaaccttttatttgtagattctaaattgattctttctgggtatgggtattgctaaagttaatttttctttacatcttttagtacatgaaattagtatgttaattgtttataacaaaatcataaatatttcaggcttcaatcttgatttttatttggcaaaaataaagaatttcgtatacacatttttacatatcaaaaaattaatctgaagaacgtgaaacttgcaagcctcgctgttttcctgtttactaaaacagtgatgggtcacagtggtgtgcagacgccagaccaccacgaagaggggtgtttgctctctggggaccatgtctggacagcttcacatgccacagttttgcagtatgacagctggggacagaagaggtctgtaggaaaacctcgagtctaggtgctttgccaggcggggtggggctttgcgttgtgggttgagtgcacactgtattgttttaaaaagacttttttttttttaagatttatttatatatgtgagtacactgttgctctcttgagacacaccaaaagagggcatcagatcccataacagatggttgtgagccaccatgtgattgctgggaattgaactcaggacctctggaagagcagtcagtgctcttaaccactgagccatctctccagcccccagtggaaaagactttttaagtgggggtgcttaaggggcagtttcaagacagggtttctgtgtacccctggttgtcttggaactcactctgtactgtatgtcaggctgacagacgtcctcctccttctgcctcctgagtgctgcgattaaagacatgggctacgacacttaggaaaagacgtaagtgaaacttaacaagaatatagattattagcatttacttcagttaattatcataaaatcagcatgccgagttaagttaaatggttcttgtgtaaccagaatcttttcttagccattttcctaacaccttttctttctaccagcaaagaaaacataatcccaacttataaaactgtagactgttgtcgctgcacacaccaagggatgggcttcatcgtgacctctactaggcttcctcttggtccatcctcttctcccctccagtaatctgtattgcagattagttttgtctgttttgagctttacactcacagaagcctgtggaacgtattttgtattgtgtttttatttgtgaaatccacgttctgtgtgaagcacagttcactgggtttattacaatgtcttatcacaatgtaaagccaacagtttgcttactccttatgcatgagtgtgcatttggtttatgcgtggacttgggctacgttcgtgctctctacattccatgctggtcttaccgccatgtttttcagtagcagccttggctgccgcattgaggttcccagtgccgtgtctccttctgaaaccatggctttgttttcttttcttttctgcccactcgtcccttttcattgtagacctgcataagagtgattacgataaccatgttatactaggctgttttaaaatctcctctgccaaaggaattaggtgttatttacaattcacccttaaacaagttcttgggacaaggtcagaaagcaaccacattctttgccaaaatatcacaagaatgatcgttagcctgcttgctaatattgctcccccctgaaacctcgtgaactgggcctccatagtccacattgctcttggtactcaagttcaactaccgttactagttcaaagtcccaaagtcttccacagtcctccaggagccatggtcaggtctgtcacagcagcagccctctgccaacacctaccttagttttccttagctacttttctgttgctgtattaagacaccatgaccaagacaccttatagttaagaatccatcatgacagagggaagtgtggcagcaggcaggcatggtgagagagctggaaacggagagctgagacctcacatctcgacccaaacaggaagcagagaacaaactggaatgactgtcagtcttcccccagtgacattcttcctccagcaaggccacacgcacctcctgaatcctacccagtccatctggggcctaagagttcagatgcccaagctatgagggacatctcattcaaaagaccacgtgaccttttgcctggtaacattgtagctggggatatttcccaagtcctctaggagggagggaggcagccatagcactgagatctctacaggcagatttctgcagccatcttcagactttatggcccttacatgcaccagttacctttctagggctgtgagtctctggaagtcagtagcctactagagctttcatgttctcagaccctagcagatggtttccagaacttgatccacccaggtcctgtgcatctccctgcatgtcaggggctgcttccatggctgctccctggcctcatttcaacacccccccaccccccaactcagttgtaagttatcagtttcctgtcaagatggcatctagctacagctcactgattcagggagcaccctccctcccaactccaaaagacccaggttcagctatgcctgcaactgggtttgagagccatgggcttgtcctgcggttaggactctcagtgacttcgctgtcagattttgcctcacctcttctgtgacttttacctactctctgtgacactgctcccatccacagcagtggcttcttgcctgcctcttacccagaagctgacaagccagctgttttcttccttggtacttgttgagttcacagtgccatcatctatcacaactctgtcctcatcacattttcatccttgggaataaatatatttaacttagaacttcaaaatggtatcaacaagccaggcgtggtggtgcacgcctttaatcccagcactcgggaagcagaggcaggcggatttctgagttcaaggctagcctggtctacaaagtgagttccaggacagccagggctacacagagaaaccctgtctcaaacaaaacaaaccaaaacaaacaaaatggtatcaacagaagattcatttttgtgtttttaagacttctttttcttctctgtttgtttctatgtctgtgagggtatatgatccgtgtgtgggggtaccacaggggacagaagagtgtcgagtctagaactggagttgtagatacttgtgagctgtgtggggttcacaaatgatctctggcttcctagaactgcagtaagaactcttaactgctgagccatctctccagccccagatttatttttttagttagcatgaattcttttaactttttgctagcttaattttactttcagagcttatttggaagacccaaggactataattaaaaaaaataaaaaaaaataaacaaccccaaaacaccgggaacttccttaatgtggccttaggaacagaaagaaacacactgtagctttcctttatttttctggtaaagagaattttctctttttctttttgccaacaggaaaatgcagttccattaaggttcttggtcatagatcagaggcttgggtctacaagaagtgagcttttggaagaagtacggtccaatatcatgggccagttcaaactacaatgtaggcagtggcaagctgcctcctccaccctctgaggaaaggcagctgtgagtgcaagttaccagagacaggaaggtggtcgagcgacccagtgagggtgtgtgtgtatgagtgaatgtgtgtgtgagtgtgcgtgtgtctatgtgtgtgtgcgtctgtgtgtctctctataagacgctcccagattcctgggaacagtttgaaagagtaaaagaagccatcctgaaaaggaatttgttttctttgtgcatttcatccagggcaagtcggctccagtttctcctggtaatgaagatgaacagctgtgagggaaacccaaaagcagcgcttaggttgtatcttgaagaggctttccgggttgtgtttgttgtgggttgaattttctaattgtgtgttttctttgcctacgatcctggtacaaacagtggtgaacacacttgtgcacagtcttgggcagactctgggtggacgggagtgacctaaatttcacagatgtgtcatagataaacaaccagctccaaaggggaaattggtttctgactttttttttttaattttttactattaaagtttttttttttttttttggttaatgtgccaactatttcagcttttttcagaagctcttgtgaaacagcaggataagtttcatttttttccttttttgacatactatttatattgaatctttgagaatgtcacatcatgcatcctgatcacactcatttcccaatcaacccttccatgtccgtccccacccttgtgaccaccctcttcccctaaaaaatgtaaaataaaagttaagaaaaaaaagtccagtttgtgttatctgtacactcactggagcatggtcagactctcagtggcctgcctcctacactccaggttcttttcaatggcttcctgtttaggccgctactttttggagggaggggtgagagctagaaaagccttttaaatcacatctgtctctttgtctgtctgtctgtcaggcttcttggcagtaagcacaggcaacaactcaccgagccatctcacagctctgcatttcctacataggtttaattttctcttctgtgtcatgaattataccaggaaatgttttgaatacattagacttgtgatgcatagttgtcagtgagttgctgagctttacccagttttcctagtgagagatgttcctaccttcccggatcctctgccaatgccccctgcagtaacagggggagctgtcagatgggccccaggaatgagaatggagtctccctcacagccctctggggactgctgaacttaggggaggctgtgtactgcctccataataatattcaaaagtcaatagctaaatccattgaaatgaactatagagtaagttagagagactgaaggcaggactaagtagttaagcccagttcagtcccaagcaccatgtcagctgacttacaaatacatacaacacttgctctaggtgacccaacacctgaccccaggtcttacacgcgttctcgcgaccggccaggaagaacgcaacaaaccggaatcttctgcggcaaagctttattgcttacatcttcaggagccagagagcaagagctctattgcttacatctttaggagccagagtgcaagagagcaagagcaagagcaagagctctattgcttacatcttcaggagccagagagcaagagctctattgcttacatctttaggagccagagcgcaagagtgcaagagccagagcaagagtgcaagcgctttattgcttacatctttaggagccagagcgcaagagagcaagagccagagcaagagagcaagcgagcaagagagcaagagcaagagcaagagagcgaatggcgaaaccccgtcccttttaaggagaattattctccgcctaggacgtattactccttgattggctgcagcccatcggccgagttgtcgtcacggggaaggcagagcacatggggtggaaaactacccttggcacatgcgcagattatttgtttaccacttaaaacacaggatgtcagcgccatcttgaaacggcgaatgtgagggcggctccccacacccaggggctcctgcacacatgcgcacagagacatatgctgatacatacacaattgtgagcataatttaaatttttttagagattaaaagtttgtgaattgtatgttttcaatttggtaagaaattgtatatgtatcataataaaaatttagatttatttatgtatgtgcaccacatacatgctgactgcctgaggaggtcagaagagcatctaatcccatggaactggagtcacagtgatgagctgccatgtgggtgctgggaatccaacctgggtcctctgagagaacaaacacttaagggtccaggttcagctcccctcaactgtatggagactcgcaactgttcataactccagttccaaagggtctgacatcctcttttggcttcccctcctccttttaaaactcgcagtcccgctgtatagtgcattgcattttctgggtgggtgagcaagaactccctcctcctcctgccgccctcactggtttgtaattgcttgagttctgttgggatgcatgtgtgctgtgagtgatgccccagcaagccagtgagtgggaactgccttcctgtgtactcttatccatggcctggcacgctcgggttagcacacttacaggtggattggcgggcgtatcctaacagcgttctaaaacaacgtgacgtgttattgtttacaggtcttggttttgcaattttccctttttacgcaacgatatttgaatatctgagggtttctatgctccacaaaagagtctaaattctgttgttttcatttaacataaaattttttggacatattttcctgctccccaactctgtacccacccaaccttatgttagctctttgctctttcacaaaaaacaaaaaacttaaaaccagaacatccccacacaaaaagaaatcaaaacaaaggaacagcaaaaccaaaagtgctcaaataaaccactgaatttgttttgtgttgggcggctgctcctgggtgtggggtttaccctgcagtgtggttgatgcacccagtgacactccattggaagaaagctcatcttcgctttgccagtgggtatcaattacagatagcttcttggttagagttcatacctcatattatacttcccctctcagtgctgggaccctgtgtggcttgaattagtgcaggtctgtgtgcacagtctctgtgagttcatacgtgcattggtcctattgtgtggagttaggttatccaccacctccggctcttagcatctttctgcgttttcttctgcgtggctccttgaaccttgaggggaagagctttgaggaagatatctcatttaagattgagtgctctaaagtctgtcacaccctgcacacggtcctgttgtgagtctgtgcaagaagcctgtctaatgtgtgttgagtgaagcactggtctgtaatgtcgttaggagtggttttatcgttctgttcctttagcatagtgagtgtgttaggttctccctaggcccagagcttacctagctctggttctttccacaaagcagtgccaagcagaggcccgtagatccaatcaagaagaggtggatacttgcggacatttgtgcagctggttgcagcagtacatcttgcaggaaggccatgatctgtaggtcacgggcttgtggcagggtggtcttcatgacggcttttctcctgaagcgtacggagactcttcagcaccatgacactcgtcagtaggggtgaagcttctaaagttgggtaccaccgtgacccctccgtgtttgatgacgtaagtaagtgtggtctgcagcaatcgggcctgagcagcatcaggttgtggagcggaaatagcctggcactcgcctgtgaagctgggcgatcccacagtgctcttctggtcagccgtcttctggcaatggagattcacttgagagcacaagtgtccagaggcactgtgttcctgtgttcctgttacctggaaactttacgtaggtcactttcacacgtgtctacctctcagggagcctccgcagcactcggttccatacggcttcccacaggcctttagtgttagttgtctgttagttgtctttagtctgtgtcccctcccttgggggatttctcctttctccttctccctggttccttacatgatacttaacctctatggttatttgataatagcacacataggtaaggtttcaaagctatccacacataagagaaaacatacgatatttgtctttttgctcgtctgggttaccacactcaggataatttttttctagtccacccatttgcctgtagatttcatttttcttaatagctaaataatattacagtgtgtgaatttatcagttgatggacatctaggtggtgtcccatttccagccattatgaacagagtagcagtgaacatggctgagcacctgtctctgttctttggatgagggtttctttgggtagatgcccaagtgtggtagagctgggtcttgacttagacggactcccatcgtcctgccgaacggccacgctgatttccgtagtggctgtaccagtgtgcactcccaccagcactggaggtttcccctttccctgcgtcctggccagcatgtgctgtcgtttgtttaattgatcttagccattctgactggggtaagaggaaatctcaaagtagttttaatttgcatttctctgatggctaaagctgttgaacatttcttttaatctcttctcagtcatttgagtttcatcttttgaaaattgtttagatctgtactccaattttaattgggttttctttatgttttttttaaagttatttatatagtttagatattagcccttttttggttgtgtaattggtaaagatctgtcgcctgctgccttgtccttggctatacaggagcttttcagtttcatgaggtcccttcactatttgttcttagtgcctgtgctgtgggtgtcctgtgccaacgagctcaagcctgctccccagcttctcttctaccaggttcagggtatcaggtcttcctgttgcagtccttgatttatttggagttgagttatgtgcagggtaatagatacagatttattctcattcttctacatgcaggcctccagtttgatcagcaccatttgtagaatatgctctcttttcttcagtatagttctgacttctctatcaaaaaccaagtgcctgtaggtgtatggcgtcgtgtctgggttttcattttaattccattggtcaacacgggtcttctctgtttccaaatgaaggttttgaaatttgtcttatccatttctgtggagaattggttgaagttttgatggtgattgcattgaatctgtagatttaacctggatcatttcttctttctctgtacctattagtgatacttttggtctttgcagagtaccccatattttcttaatgttggtttcttactgtggttagtatgtgtgcataatttttaagacaatattggatgttatctttaaatttttctgttcttgctgggcatgctatgtgtgtctaatatttgcagtccaaatactgaggcaggaggatggtgaattcaaggctgggatggccttcatgatgagccctgtttataaaaccaaacaaaaaattctaatttttatagtctaattatcacttaaaaggtttttttgctttttatttatccttattttacatttttaaaaaatttatatatttggcatcattttgttatatatgttatgaatttttctgcccacgtgttacccatcttgtacctcattgtataaatagtactttagttatattatttttttaaatattcttttcatttttttcagggtcacccaccaagcctggtgtggcttgcacacacatacttctttagctagtgggtaaatggttactttttagagtctcaaggacattctttgcttagtagtttgaagtaatagcatttggtatgtttaattcacaaatccacattccaaaatcagttcttttgatatttttgtttattctactgcaaaatctctcctttttaaataattgtggctccacagaagtgttgctttgtgagtgggaacatcctcctgaaacgagtctctgagtttcctttgtttctgtgtggtgatattttatctatactgtgctattcagtatcatgtaaattcctgttagtatttttatagatgatatgctaaagtttaggttcacctagtgacagactttatacttctacaatactatacctttttattcataaatgtttccactttaactcatatttctggtggcgttcagtcaagttcaatatatgtcagcccaaacatcttatatattttaggttcattgctggacagtttttacatttatttatttgtgtatgtgtgcatcttgaatatggagttcagaggaaacttgtggatgtcaattctgtctactgtgtgggaaagaggcagtaacaaagtatggctctcattcaccatatattcaacaataatggccaaaataactggccacaaagaattgtataactgcaaaggaccagagagatttgatgacagctgtcctagagcttggcttgcttagttggtcggtagagcatgaaaccttttttttgggttttttgttgttgttgttttgggttttttttttttttttttttttttttttggtttttcgagacagggtttctctgtttagccctggctgtcctggaactcactttgtagaccaggctggcctcgaactcagaaatccacctgcctctgcctcccgagtgctgggattaaaggtgcccagcaagcatgaaactcttgatctcagggttgtgggttcaagccctacattgggctccagttgtaaaattatatgaattatgctcatccccgactagcttcaaataaatgagactcaaactgtgatttcttcattaggcggcacaatgactggggaatcgcccctaacactaggctggctgcctcttcaactgtgctccccaaagttgaatcttcctgggttatttctgctccagcagtctggtgtcctggggagctatttgacttaggtgtgtgccactggtccatcatgaccaatgcagacctcctcttcccgccatcttctcctcctctgttctttctctctcctttttacctgctgagccatcacactggctaagtattcctaaacattgaatttgttactattacagctggaattagatcaacttttcattgtttatcacttgtgtatcagaaggcttttaacgtaagtggatatttgctggtgtgtgttattgtgtacagcgatgcagttcataaaggcattttcatatacagatatttcatgaaccttgacactctgcccatacgccctgccttcccccttcccattgttcttacccatcgccagaaccaatctcagttccacttgcacatcccgcacacacgtgattataatgcacctgtctgtctgagtctgacgactttcctaagatgatggtctgcacttggatctgtttatccgcaagtcgtactgttttattgttcatggctgaggaatgccacatgtcctttattgatttgttgattctatgtcttgacgcttgaatgttgctgtaaacagatgtgtgagtgtttctggcttgttgattcagagtcctttggtgtctagtgatacagctttgcccatgcagaagtttagatctatcctgatctccacaggggctggactaacgcacgttccccccagcggtctatcagggctccagcccctgccgtgtccatcacaccattttgctgctacttgttttcttaatggtagccattctgcctggtgcaaggcagagcaagttttggtggtcgagctggtgcagcacccattagcaagaacgtgccttgatagtggggtggttgccacagaaacttttccactagggatgtaattagcatgtaattttgcagtgtctagtagttaaaaatgagaaggaactggtgaaaataattatgacacttgaagcttatatgttagtgtagaaacaatgtagaaacacgagacattttattcttattttttggtggtttgtggtgtgttcatgtatgcgtgtgtttgtgtttgcgtgtgtgtacatgtgtctctgacagccagaattccaactcaggcatcattcctcgttttcaatctaccttttttttttttttttaaagttgaaatttttatgaggtagggcctatcactggcctggaagtcacaagtaggccaggctgctggacagtgagtcccagagattctcctgtctccctctccccagggttaagactgcaagtgtgtgttaccatgtccagctttctgttctacataagttctcaacatcaaacgtgggtcctcatgtctccaaggcaaacatgttaccaaatagctgttgctgtagcccctgccttttaatgttaagtctttcagattaactgtgtatcttacatctgcagcataatgcagtttagactacacagtgcttgctcagctgtatccaagtagtggctgcagtgttgcgctgtgtgtttgtgagtgttcagccatattgcctaccaacagcaagcccctctacaactttgaaaacatggtttaccttccttgatggtctttggaaggagcccagtgctcagtgacaggaagggggtctgtgcagagtttgcgtcgtctcacctgggagcacgggatttggattttccttcaatcgtgttcatttcctctttaagacatttgctctagagcagctttgtccactaggagtataagtaacagtttacaaggtctagacttgtattttaaaaattaagttaaactggtgaaaataattgtgatgaaaccttaactgcatgtataaaatgacacctcaattcaacatggaaacaatgtgaaatgttagtaagtcactgtgtactctttagtggtcatgggtgtgtgtgtgtatagaatcctcaaataatgaacttgtttttaattaagagcatatttctaagtattaagcataaatgtataggatgcttacgttattggtggcatggtcctaactgtatgttttctttccaagctggtctctggactgtcttcacgctaggcggggcaggcagcaaagcagctgcgtccccagaacttacatctcctctggccaaccagagtctcctgctgctgctggtgctggtgaacctgacggatgccccagacatacccaacccctacaggcaagctgtctcgtcatttaagaacacgcaaggttcgtggtggttttcccttgattgactttcttagcaagtagaggcttgttgtccccattctctccatcggtgtatagtttctgagatgagtgtcagaaaaaattggagtgtgttttctcaggcaggtcaaataaggcttagaggaattctgtggtcctttacgtctattcaatttacttttctttcagagacactccgagtatctgagtttcaatgctagggacattagcttgtgaaacctatatgacaagatgctttaaaattctaaagtctgtattttaggtaaagttttctaggactaagtactgtaacagaaataagcaaaaattttttgggggttgttgtctgtgttgcagcctcctccttgccctgcctatgacgtagggaagcagtgtgggtaactggagggaacagttgtgagtctgccccagtaattgtttcttagtgcaggaaggcgtgtgctgggggtggggaaggggtgcagggctgggcaggcccaggagctgtaactactgcccctaaagcagactgtaaatgggtagtcccatgcggacgtagctgggtgttaggaatcagaagtttgtactctgaaaggcaggatcctatgataggtgcttggatggccagggcaggtccagcactcatgcagtattaagatgagtaagaagtgaagttcttgggtaggattgtgaaggtgtctgagtcctagtaccactctgcttccctgcccgtgctgactgctcacagtcagggcattggggtgccaaggggtcatacctttctcactcttgaaaacaagtgcggagtcctcatccattcgtgctgctgtaatagagcactactactaagactcggtgatttgtaaagaacccagatttatctcttgctgtcctagagtctgggatgctgacgatgagagcctcagtgttcagcgttgctgagctgaggcccagctctgcttctaaggcactgccttgaatgtggattcttgccttgaatgtgggttcttgccttgaatgtggattcttgtgtgggaggcgggatggaaggctcttgctgtggaaagcctgctttatcaaggcctaagccctcacaagggaggagcacgcatgcccaaaccacttcttgaaagtcctgctgctaccgcattggcagctatgattttacatgcacttgggggacatgggcattgaagccatagtgtaagtggggagtcagttcagttcagtggatggaaatgtagacctgggtgtggttttctgttccattactgtcctcagtttcttagtgacagtgttacttgatggctaagaaagctagttttggagctgagctgagctgacctgggttcgcaccacaccctgctcattttagggtgagatctttggcagtttatataatctcaggagccctcaatggtggtgtctgcaatatggatatacaatcgtacaacacttacataaataccaagcaagagtggagtgttaaccacagcgaggacacagcaaggactcactgtatggtgcttacatgtgcaggtaggactgaccccacccgagacctcagaattgaaccgtgtctccgcttatccttttttgagagactcttaagcagcacagaaattctaggtactgacatcagagtcaggtagactataatctctgtctcgggtggtttttaagaaataaaagcttttactgtagtgtagattcaccaccagtcatggctattaccctgagaagtaatgtatcgtagaggtcagtctaggttttctcagggtacttgggaaattttattaaatctttctgaatttctatttcatcatttctaaagttgggcagaataatgcctcagtcattgtacagattaaataagggatactagacatacacgtctgtacagtggctccttcctgtcacttgctggctcagcatgtgtagatcttatggagactctcagaacacatctatgtcaagtatagcataggtcaccactatacttagtaagcactctcctctgctctcattgtaaagaactgctgtgtctagactcttctcctgtgagtcctgtaaaaagtatgtaatatttgtatattgctgtattgcttacttatcttttctctgtgacatacaaatagcaagttatggcaggaagggtttattctagctcatgggtggttcccaggtccagtccattatggcaggaactctggcagcagccgcttgagaggcagtcatattggatctacagtctagtagtagcagcgagtgctggctgcctgtgctcaccttgttgtctcctccctagtgttactgtgcttttatttagtctgggcccccagtccatagaacaggactgtaaggttgttcttcctacttcagctaacctaatctggataatccctcacagacatggtcagctgtgttctcacagtagtcttaatctcatggagactcaccattacaactccatccttgtcagcttgacacctaaatacatgtgtttcccgctgtatcctttcccctttccccattgactcatggccatctcataatgcacaatgcattgagtctccatagtctctaacaatcccaacactattcacaactcaccagagactcaagacagtctctcagctgtgagctcgtgtaaattcaaaaccaagttgcaaactcgcaagacaacataaacccctgtagcaccgttcctggcccctgtgctctttcgtgacacagctggaagatttgaatggctccggccctggcagctgcaggaaatgctgcctgtcttctgggccatctgcactctgaacttggagctttccttaccagacatcctgcagtccttgtctgcccaacaagctgtgatgttctagtttaattctgttgctgtaataaaacactctgaccaaaaacaacaggagaggctcttccaggtcacagtttattactagaaaagtcatgacaggaactggggcaagagccgtgaacccagcattgcacgctagcttgtctctggctcactttcactctcgctcacaccttcctagtgttcttacacttcccaggaccacctgcttcagtatggggccacccacagtgggcggggctttcccagaacagttaattgcaaagacagttccctacagtcatgcagaggccaatttggtctgggcctccgtctccaggtactttactctcagatggctctgagctgcatcaagttgagaattaaagccagttaggccatgggatcccttactgcaccttagattttactgcagcttcatgcagtggcctcccagtcactcccaatcgtgcgtggcctggactctctggaactgagtacaagattccatgaccctgtcagtgggacattcatgtttacaagtgcagcacaatgtggctaggttctgccgccagctcaggccggagcccgggcctcttggactacagtttcatcaggctttgtgctgatgctagggaaacaccccctctctggttgtctctgagcagaggactccttcactagtgttctacgcttagccctcagaactgtcttcctgttgtccaggtggagagcaggcaccaaggtctttaacaattatacgtaatttgtcctctgcactcttgtctgaaacatcaagggactcacatactttcttcctgaaattacatttttccttccctttccctacatctttgctcccaccgtggacctgcatgtgctcacggaagccagaaggtctcgaggagctggacatgcacgtggctgcgagccagctgagcgcagcgaaaggaagcaagcttgggttctccggaagagtggtttgagttttaaacaccaagccttctctccaaccccttaaagtttcttttaaataaaagagttttatggtagttgccttagcttgtgtttcatatgttgatttttctcttattttaaaactaagtcatatgttgatgttttagctatttttcttaaaaagggatcaatagttgtagtcagtgcttcagttgtggcttacagtttgaagtgctgtaaccattatgtatgtgtaaatacacaactcacaaaatacttatgtactttttttatatatttttgtgttgattttctgtatttcagacagcagtccgttcccatcatcaattcctcataccttccagattaactttaacagtttgtacacagccctgtgtgagcagcagacgtctgatcaggcaacgctgctcctgtacacgctgctccaccagaacagcaatgtcaggacgtacgtgctggcccggacggatatggaaaatcttgtaagtatcaagagacacttgccgtgtgtgtctgagacattacagagggatgcgttttctttcccaagaggctcagagtgctcacctggtggccgttcaggtggtgctggggagacagatgagaaatgtccccagactgaggtagaactgagcaagcagcctaggtcttgaatgacagagcctttgtccttgaggtcctgagcagccacctgttgcccagggctccacctgagcaggttctccaagcagcatcctctgtacccaccgaggacagctgtatttcttcatgttccttctagctgatgagggctgtccaccgctctgttggtcatgattgccacacagctctgctgacagtgatgagggtcagggtgactgtcccagctagcttcccgaggctctgtcctcacagcctccaagcctgtgcctctgaatgcagtactgcactgttagtcatttcagggcccctggccagataccacttaaaggttcactcagtgaataaaatcagttccgcagtttgtcttggtcttggtggacagatctcctttaggcagccatggctttccattgaagctaatatttaccatcagagtttcagtaaagggaagggtaagttaccgtgtgcttgagatactgtgacctctcactgcactcactgacacacggtcatttctaaaggagccagcagttggctgacagcaacagaatgccccccttagctctgcagagcaaacaaagcaccactggacatttggtagcttctttattggttttaaatactatgtaagtgctgaagaaacataaaatatgagcatattttatcacagtggcattaagaacaaaaggtgtgatgaactaaaatctgtctccacaccagaaaggagtgggaatcgtggtaaagtccgcatcatgagcagagctgtgattcctggtgggcatggggatcacagagatagttgtgtgtgtgagagagatgaattctggggggattttggcaatgagcaggaagcctggggcatgacttgtgggcttctgtggtgcagatgttggcttgtgagatgagagcacatctgtctccagtttgagaacacacactggtaaaaggctccaacagtgggtcacagccctttgggggtcgggtgattcttccacagggatcacataccaggtatcctgcatgtcaggtatttatgttacaattcataacagaaaaattacagctatgaagtagcaatgaaatcattttatggctggaggaactgttttaaagggtcatgacatgaggagggttgagaaccactggtctacaaggtttcgtttgggagttttaggagcataaagaaggatttcaataatttcctagctcatgtccttatctttacagttctctttctgatatagtaaatattggttgaggctgttacatgtatatattgctgcaagtaggaatttattctgccgatctcatttttaaatagttcacagctcctttattctatagactctgatattcaaaagttgatatttcatctccacatatttctcagatatgttgtatgtagagtttttgtgagaaagaggctagatctgccactcttcagtgtaggccctacctagtggcatattttgtgactccattcatataagacttgaaaatggtgacagccatacagccatagacacagttgtgtctctgatcactaggtgactgttacagtctgtcctagtcagggtgaccattgctgtgatggaacacaatgaccaaaagcaactggggaggaaagggttatttcacttacccttcttggtgacagtccatcacctaaggaagtcaggacaggaactcaaacagggcaagaacctggaggcaggagctgcttattggagggtgcttgctcctcatggtgttttaacttgctttcttgtagaacccaggaccactggccctgggtttgtcccacccaggatggactggtccttcccccatcaatcactaattaagaagatgccctgtaggcttgcctgcagcttcatcttacagaggcattttcttcatcttatgtcatctctgatgactctagcttgtgtcaagataatgtaaaattagccagcacaggtctgtgtctgaaacatcatccaagggcttacagtctaaacatgcagcaacttgttgggggattttcaaactcccatatcctttagggaggaggtgaagcctggctggtagaaagaattagttcccaaggcatgtgctcctgaggcctgtgcccagccctgcttgagatcccaggtttctgttttctggtttgtaccttgtgatatcactgctatggtctccatcatgccatccttactgtgacatgtgagattcctctgaaaccacgagccaagcaaaccgtccctccagcgagctgattcttcccgctgtgttctgttttggtcacagtgacaggaaaataacttggtgagagggaaggaggaagagtgatcagggactgcgagctaaagggcctgaggtgattgaaataatgaaagcaggctaaagttagttggtaatagttgctcagatttgtaaatctaaaaaccatttaatgatacctttctttttttaaaaaatgaagggattgtgcaatatgtaagtttactattccaatacaaatacttaaaaggaagaattgatctgttactttggcatagtcctcttggacccatcatcttaaacttttaatttgtttatttttggaggcaggggttgggagggttgttcgagacagaatttctttgtgtagcctggactgtcctagaactcaattggtagaacagcctggcctcagattcagagatccttctgtctgtctgcttctgcctctgcctgctgggattaaaggctgtgtaccactataccctgtatatagactcttttaactttttttttttttttttttggtttttcaagacagggtttctctgtatagtcttggctgtcctggaactcactttgtagactaggctggcctcaaactcagaaatccacctgcctctgcctcccaagtgctgggatcaaaggcgtgcgccaccaccgcctggccgactcttttaacttttaaaagattttttaaaaacacatctcttcctccatgtgcatgttcgaggttttagatctccaggtcctcttggattgctgcagggtggtgtatcatgggattatttcatcttaaagcctgtagcatactgtcccgggagtcagggtaggagcttagggcaggaggagaggtagaagttttggaagaacttactcactagccttctttccataatttccttagcctgtcttcctcacaggcttgggagccccagccggaggttggcgcttcccacactgagctgagccctcctttgttgatcatcagtcaagagagtgcaccacaggcttcttgcccacaggcctgtcaggggcagcagagtggggaggcattttctcaatcgaggcttcctcttctaaaaggtctctagcgtgtgtcaagttgatataaaactagcctgcacagtctgtatgatagtttcatgcaatttaactattttgcccacatacttttagtgatgtttttttctaattagtgaagaatgaacaaattaactatgtgaaaggagcaattagaaatgaacttgtacatttgtgaacagggtcataagataaggtgtctgatcagagtcaccgacgactgtctcggggcaatgctgggaaaatgcaccatgggctacaacagtctcttatgtgaagcacagttttggattattagcattaaagtgcacgcggtacgaagtgtgcacattaacgtgcattaaaatttattagcagctaagcttttctgagcagctcaattcttttcttccttttttaattagagggagttgatgggacctcttaaaatcaccaaactgagcctaagtggccactggaaactaggttttctttagcaggacatctgtaaaggtgactttcttacctgggaccttagctatgtgtgcagagagtacatgcagccaagtgggtgtctgtcctctttagttatgaaaactgtatagcctaatgcaaaacatgtagaataacagtgtaaagttcttatacggtattgaaatagtataatattttatttcctaggttttaccaattcttgagattttgtatcatgttgaggaaagaaactcacaccatgtctatatggcccttataatcctgttgatccttacagaagacgatggcttcaatcggtccattcatgaagtggtaagtctccgtagctgatgacaggtgcagaacagaggggcttctccacaaagtgcatttacttgccttggggtttcacccactctccttctgctagagtgtctgggaggacttggaatagaaatggtgttttcttccggttcataaaccagtatagtgttctttaccctccttccctgctggacagctgttaaccactgttaaaacttaccagtaataatagataactcattgttcttctcacatgtatattattctcattaggatatgtctattgtacatcatgctgggttacattaggatatttcatatgaaaacacaatatattttgagcttttccctcattgttctcctaggacagttttacctatgaacttgggggtagagggttgggcttccatgacagctacctgtccccactgcgccgtgtcctctgccctgtgctccctttgccacggcctcagcttttgttactgtgttgtaaattccggccattctgacctggacaaggcatagtctctttgttgttttggcttgcatttctctgatgaccagtgaggctggacagtttgtgtgtgtgttagcttttcttagaattatctattcacatcatctgtccatttactaattgcattgtttgattccttgtcatttagtagtttgagttcttcctatattctcaaagtcagtcttctgtgggatgtctggatagcaaaaactttcttcctgtaggccgtttcttcactcagtgatgactttcatgcactgaagttttttgcttcctgagaataggacctttgtcacctgtgattatttcctgagcagctggggtcctgttcagggagtccttgcctattcctgtatgttgaagtattttccttctctctgtttcagagttttacatttgatctatttggacttaatttttttgttcagggtgaaaaattgggatctagttttatttttcaatatccagtttttgcagcaccatttgttgaagaaaccatattttctccagtgtccatttttgatatcttcatgagatatataaatacctatatatcatattctgtaaagttgtcttatttatattattagtgggttggaagaattctttatatatttttgatcttgtgcttttttccattgcagtctgttaatatagtgaaatacactgatgaatcttttcattgctattaaagcagtcctcccattcctgggatgacaccatgattggtcatgatgtgttaatttgtagtatgtatccatatactgtttggttaatctttgagttttgttagctgtgtcctaaggaacttgcatactttttctaagataacctttattgccttggtactctctggcagctctgaacagcagcaggagaacctgggtgtctcttctcactcagatgccgggctcctggagctcctgcctcacctggttgtctgtagaggttttttcctctgttgagaaggttctgcctctcagcaccgactctgacttacttttgcttcctaatcactaagctttgtttgtttttttctgttccttttatctgtgtgctgtgtctatttcatatcattttccatttacatctttgtctgctaatggtatcagtagatttcctcttgatttctggacctcgtcttttctccttcatctatttaagaaaagagaaggaagtccattcatgccatttgcttaggagaactgaagctctcagctcaccttttcatggcataacttaccttcagagcaaaatgaactcacagaaaatggtagacataccctttcccaagggagtcgtttttattcaaacttttcttctttattacagatattaagaaacattacttggtattcagaaagagtcttaactgagatttccctggggagcctcctaattctggtggtaataagaaccatccagtacaatatgaccaggactcgagtaagtatcccatggctatttctctgcctttgtggagtgaagaccatatcataaagctttaatcttatgaaatgcgattatgaaatgcgctagaaaattgaaatttaatctcatagaatgtgctaggaaaatgtggatcagcacttagcatattatattgctgtgtctatcttaatacttagtggctgttcaatgagatacacttggcgcgcaatggaaagcaggcagtgagattggagctgctgcgtgtgcttgctggactccggactctgctttgcccttttaaagcaacaacaaaatacctagagatgagaagaagggaaaatacaaatttagatcaggaagaaggtgcaagaggctgaggctgttgctcgactggcagtgcagctggcacgcaccagctcggctctaatcacagcacgcctgtaatcaaggccatcctcagttgtagaacggcttggcttggcttggtttggtttggtttgatttggtttcagcaggatcttactgtgtagctctggctggcctgtactggctctgtaggccaagctgaccttgactcaggtccaactgcctctacttacctagtgctggggctaaaggcttgtgccgtcatgcccagcatatatagcagatctgagaccagtgtaaataaattacatgagaatctgtcttcaaagaaaaacaagcccctcccccaaagtccaagagagcaaaaaccttgaaaagttggaaaaaaagaaggcaagcaattctgctgacctctggcactttagacttagccaatagaaatgcgttaccacggagagcagcatgcagaactcataggttgtttacttaatatttttaagtatttctgtccgtggggctcgtgtggatagctgtcccagtcgtttttattttgttttatctgagattgtaggaggcggtggctgttttaggagggagaagtccttgtgtgctggggagatggcagcatgcactccctccgttgctgtgtggtgggagggtctggagcagcacaccacagaggcatcactgttcctgctgcagacggcttcagtattcacaccgtggcgatgatcatctggattgttcagttgcatgtccgttgcttccatgggaatttggaaacagtttgacttcttagattgggaactagagaatatagatcctgggtgctcttctggcattagggccgttgggtgtatgttgcttttagttaaccttccttgaagtgtggagaagatgcggtcggtgtgttttaatcttgctctctctccacaggacaagtacctgcacacaaactgcctggcggctttagcaaacatgtcagcgcagttccgctccctccaccagtacgctgcccagaggatcatcaggtaagcacaggcttgaagcagacactgagctttgccttctgggtggtcttttaagacaggtcctatgccagggtcttttctaaacacgtgcaaaaacgacaggttttcctcagattctcactgctttaagaatacccggttctgttttgtttcctaacatagttgttgagcagagttgatggcatttgtatttggtcctttcatgaactagagtgttaggtctcatcttaggttgtttactggctttccagagacatacgcactcaaacgaaacctcaatcactgtgctaaatattttttataaagcaccactctacaccttcatagttttctgtgtttgtctttgaggggtttcacttttaattttggtagggttttgtgcaagtgctgtaccactgaactgccgcctcctaccaaggattccctccgtggctgtttaactttgccacagcagttactcctgttattaacgtaaatttgttctattcccattttgtaagctacaatcataggcctgcagaggtgcatctttcctggaggctcagtgggagggcctgctcgccagatgttagagcgccttgctccttgcttgtgctctctgctaccatcaagagtgggtgggtggttgagtccctgtctgatctcatggctccagactcctttttgtggtactgtcttccacttaaacattgcctaggccctacctcacaaatccagtcagtccccttccagccttaataaccttacagaatcataactgcatgctccttttggccaagtatagtaacatattaacattttctgaggagctatgatttggcctgccctaacatttgtcacccagttctttaaatgtaggaaagttaattatcaactcataactatcacttgcgggcttttcttatgcatataggtatttttattttccagtaggtggctcaatgttgtcttagcagttttcatggaagctgtaattttcttctttaattcttactcttaggacagtgcagaatttctctgacactggtgactggacccgaggctttgctcagcttatacattggtcccactgctgtcaccggcccttgtctctggcccttgggttttattggcatagggtctcaccatgatcccaagctggccttgaatccacccacaatcttcgtgtcttggcttcctgagtcctgtaattgcaggcacgcgccatcacccccagcggcagtcagtttggtgtgtcagactgatactgatcccagctccacttggctcatgtgtgccagtcttatattcgacccatgtgtctgtccatttgctgacctgggcttatttcttgtataatattacttattcattccccagaatatcatgcagtatattttgatcatctttatctctctgacccagctctttccagtttgtcctccatctccctactcggccaacttcacggtctccccctacctttgtaaaagcgtcattgagttcagtttgtgctggccagtgagtgactcctgggcgtggggcctgccctggagtgtggttgacactgtggagtgtgtatcacactgttacctctcctggccagagttcctcagctgggacatgggactttggggactttgtgaccaccttttcttcttctgtgctgggattttatctggcttgagcttgcacaggtcttgcatgttttcataatcatcttgagttcatacatgcatctgcctggttgtatccagaaaaatttggggtttttttgaagtcattcgcctttgactctcaaaattcatctgccccctcttctgtataagatccctgagctggtgtgtgtgtgtgtgtgtgtgtgtgtgtgtgtgtagacatccacttagggctgagcactccaaaggctcttattctctgcacattgatcagttgtgggtctccaggctaattgccatctactgcaagaagaagcttctctggtgagagctgagcagtgcattggtctaaagatgtgcagtaagacattaggagtcgctctaatgctgtatccctttaggggaatgaatggccatagtaggttttcctctaaggccatctatctagccatagccttgttagcggtgtgaggtatgctgacctgggctcaattttggtaactactctgaattaaattctattctttatctgttttcagaattcagtagagactattttacattgactcacaatagaattcatgtctgctctttgtacacgtgactgcagtagggtgggacatagtatgagattgtctggttagctgaccttgtactaacatgagctttatttcttaccaaaaatataattgtctcctcataccctggagtcttcctgctattctgagtagcccttagtttccaagagtgaacttgtacccctggctttattccagcattgggagtttaatggttcctgctgctttgtggtccttttctgtctgtatacatggagttttgcggtggcttcagattggttttcttataatgagtattttctttttctttctttttttttttttaagatttatttattattttatctaagtacactgtagctgtcttcagatacaccagaagagggcatcggatctcattacagatggttgtaagccaccatgtggttgctggaatttgaactcaggacctttggaagaggagtcagtgctcttaatcactgagccatctctccagcccataatgaatattttctaaggcctgtcccatatgcaaattccaaatgaattagttcataacttaagttctggtagtgtgttttagataaagttaaacacaatttcctagatgtaatagttagaaaaacattaccaataaaggcagtatgcccagtttttttgtagtccccaaaatagaaaataaaccaagataaggaatataggttagatgtgtgacgtgggagtgtttagatcctgtgaatggtgcttactttaccatactgggttttcttttagcagtgtgtgaatgagggattgtgttaagtaatgtaaggtatatcagaaccgatgataaggatctcgccctcaaataatttgtaactcagcagcagatgtaaggatctgtccttgtgtgtgtacggtataaagagcttacatagacaggaatgctgtagcagagtagaattcttagcatgggaagaggcggttggtcatagaacggtgagaagacatcacgtgaatagatgaagcagggtgatgacagcagacgttagatactgaagctctggaacacatcagtgacagccaccagggtgagggtagggtcacagtgagaaaggatccacatgagagccagcagtcccagtcccaggagagaaagaggacaggtgaatgacaaggtgaaggacaagagagaatgtgctcaacaaacagtatagacttgtattaacaggtccttatacagaccaccactgtgtgagtacatagcagtgaaaaaaaaaaaaaaacgggaaataaatttacacagttcgttcagttgccatgctgtggacatacacaggtttaaaagcaagaagtaagatgagctggagacttggggaggacctcaaatgttcaacatagcagtgaaggaatgaattgtagatgggactgagacaaagaagctatggcttcatagagtgaccctcattcagtgatcacgtcagaacaggcagattggagccagttcccagtgctgctgctgccgctgctgcctgtctgagctctgtatctgagtggctgctctggacagtgcatccttgtgatgtaggaaggcgctcactctgcaaaactcagcgccatcttcagatgctttgtctgcacagtgaagtctgggtcttgaaaccaagattcattctctaaggaaatgcttagagaatacagttacagctttttgtaactgaagagaactcgttttctaccaaatgtttgtacgtagggttagattgcaaggcatgggaaggactgagaagccatagctgtgcagagtccagggagttggagagccatcctgctaacccttcccagtgagaaacttcatgaatgtattctaaactctcttttaggaaaagtctatacagctttatatatgccagctgtaaaactcagaggagccagtattttatgtgaccttcaacaagatacaagagtcacatgttgctatgatgctatgagaggattttaatgaaacttaaaatctttcttagttggacataaatataagcaacaatttctttgtggtgccccaatttgttcatatttgattaacagtaacgccccccccttacacacacacacacacacannnnnnnnnnnnnnnnnnnncacacacacacacacacacacacacacacacacacacacacacaaattcttagtaccctagagaagtcacagcagatgtgatctgtgttttgattaacagatttacagattcttgagaaagtttgagaggagcatctaattagtgcgcccactgtttgaggtgagtgatttgtctgtacaggagtaggttatgtgtaaggcattatcgggaaaaacaaacaaaagagactgcatgcattgccgtttatttcctgactttaagaatttcctttagcctggcatggtgtcgcacccatttgatcctagtagtcaagagacagacataacatagatctctgtgagttcaaggccagcgtggtctacaaagcaagttccaggacagacagggatgtgtagagagactgtcttagaaaaccaaaaaccaaccaaccaaaactaaaaacaaagaaaagtttcctctgtgtctcgtacccaccagttcctgtttctggcttctacaccacggattaccaggcatttctcttcagtatctcatcctgtcttcatcttttctccaggaagccacctactgtacactcataggtgggaaacacctattgatttgtttatagtcaagatctgtctccattgtactgtcagttcagtgtagtgtaacagaaactagagccaactgtcaagggttgggatatcggctccaaaacttaccagttgtggtgtctccaaaacttaccagttgtggtgtcttggaaaatatctttaactcccctctgtagcatgtccccccaactgtaagatgctgtgacaatagtgactgttagaatcggaattcccggcaggtgtctgactccagcagttgccaccttgccaggtctgtgcattctcctggctccaaagcaagcaaaagtaaaagtgaaaaacagagcaagacggggtttatgaaaatggccgtcctgggaggagagtgagcgttacgctttaatggcggaggttttgggacaaggtgaagtctgcagtcattaaatagttttgcctaagagacatctggttgatctttttctctattgagaattctgcaggcggctcgaaggaagtccttattgcttgaggggacagcccattttccctggttgaggatgttctcagtaggagcaggtgtgtctgcgaggctctgctgtttgcaaatccaagctgacttgcaggtttagcacaatatctgaagacctttgggccctctttgggtctggaagagattgttgtaaagaccaacaataagggtgccttagttaagctgggcatggtggcgcacgcctttaatccaagtactcaagaggcagaggcaggaggatttctgttaattagaggccagcctggtctacagagtgagttccaggacagccagagctacacacagagaaacccaacccagtctcaaaaaacaaaacaaaacaaaaaaaccaaaacaaaattaaaaagctgccttggttacctttctccccatctccactgtagaagagggacgagctggggaagatggtgcggcctttcagactgagtctgcttggatggttaaagtttgcgtgcagagtaaagctggactctgcccagagtttttaagatgaagaagatagcaaaaggaagatgtggatatgaaatttttatcttgctgttagttgccctgcagaccccaagaagggattggtgccatttctaagtctttaattcccccttctgtttgagcagttttccacctcaggaaagtgggtgtcggccgtctggccgtgtgttagagcagtgagtgagaaggtagcaggtcctagtgcttgagacaggcaagggaaacggggccagctgaaacctgagagcagcgtgcatgccgtcggaggcccacggcagcagcatgcagttaaacactgcggcgtttctgaccttctgacatcgcagtgtgacaccgtcacagtcttgacaaatgtgtgatcaacagttttgtgctggtttctcagctgtatgtggcccctgggccacaggttgggcacatctcagaggtcttgtccaaggtacctggtgaaagaaagggctttgctctcagctcttccctatcccttctggcttccattacctttgcaagagatccactttgtaccacaggctatccttgaacttgctgcatggcctgcctgggatgagttgaacctaagtccattctctttcagcctctcaagtgccctggtatcttctgatagtcaatatttccggaaatgatgcaaatggtgatgccattggatgtaggcagaggtttttgatagtagcagtttacttgaatgggtgggtctcagcaagctcctgtgagggactctagagctctagccatcataaacgtgcagtatttaccaaatcccagcagtgcgtgtgatctgactttttcatagagaattcacttgttcttccccaatgcctgggcacagacaggctccagattctgccttgctgtggtctccgatgatcctcgtttgatcttggcagagcactagccaaggaaggaaggagaaatgtttgtcttagaaacctggcttcctgtacttcctgtggcagtggtactttgaaggcagagaagtttttcagggaaatttggcacggcttgcctttcagtttagtcttcttaagaagttacattaggagcatttacagttcccagttggaaatttctaagcttttaattgaactttgtgactgtgtagagagttgctgtatcatacagcagtgtcctggcaggcttggtgggacatgcgaaaacttcataattgatttaaattccagtttagacggctggcacaagcagaatgtttgctttcaaagcaggacagtgcccacttacccgaatctgctttcttgtaagtagagacctctgtggacagccttgccctgtgggaaatgaaccattaaactagcatgcttagagctctgtagactgtaacattgcatggtagaggtgcatggtctgcgacccttagttgtgtattatcaagcacccagtcctgtctcataaggaccagggattttatttttaccctacttttaaaccaaaaggatgacctgtcatagttttgtggcagtctgatgcatcgtctcttttcatatttattataaacgattgtcactaaagcagtaggggtgagtgtcctcatactgtcgtcttgctctccatgcccccagtgcagcttacagaaggtgggtaagagctgcacgtgcagtgtgttgtattctaggactggagccctgagtgtgagactccatggaaaacagtggccctgattcacttctgttactgtgacaggaacaccctgacaagaagcggcttaggagtgaatgggggcctttcgctcagttccagcttacagtctgtcgtggggaagtcaaggcagcaggaattcagcatcgctagtcaggaaggaggaggaaggaggcgtatgccctcttgcttgcacttagctaggtctctctgtcgtcttttaaaataggctttgagcaaaatgtccagcttgacttctaagggaggcatccttgctttgtgtgacagcagactgccccctgccgcagagagagacagacatccatgacaagacagttcacagcagcaggctgctcatggctctgctctttaggggatgcctcccagaaatctttctttgctgtgtatttctgatgctagtggaaaaggctgtcagtgttttatgggaaacttgtcatgtcccctgtggcaccgtggggttccttggtgaaccacccaagaaaagagtgaccctctggctgccattattgtccagagtagtcatttggttgatcccacttggactctctcttacctgtgtatccattggatttacgtcttggaaactgagtggccacatcagtcccttgattcccacccacatggatccttatgaatctctagctcactgttggtgttcagtcttggaagccttaatctaagtgaccnnnnnnnnnnnnnnnnnnnnagagagacagacatccatgacaagacagttcacagcagcaggctgctcatggctctgctctttaggggatgcctccccagaaatctttctttgctgtgtatttctgatgctagtggaaaaggctgtcagtgttttatgggaaactcgtcatgtcccctgtggcgccgtggggttccttggtgaaccacccaagaaaagagtgaccctctggctgccattattgtccagagtagtcatttggttgatcccacttggactctctcttacctgtgtatccattggatttacgtcttggaaactgagtggccacatcagtcccttgattcccacccacatgggtccttatgaatctctagctcactgttggtgttcagtcttggaagccttaatctaagtgaccttgatagatccaggatattttgagtgaaatattatatttggtaaaaattatattgcatcataaaattacagatttttttaaaacctttaacaatcatctctgacaacttttcacagttggcatatggcaatgtggagacttagagttaattatgattaatccacatagacattattgcaggagcagatatagaagtcagtttgttcagctcatgaaccagtcagtattcatataacaaaagaaagaagaaagagctaggctttgcccacgcttattctcgttcattttctctcttcctcactcccgctccctcctactactccctcccttcccctccccatcaatgtattaatgtgctatttgacatgaagcaaattagattcatttttattcctttgtttgtttgtttttccagacagggtttctctgtgtagccctggctgtcctggaactcactctgtagaccaggctggccttgaactcataaagatccacctgcctctcctaagtgctgggccaccacaactgagctacaagccaaggtctgtctgtctgtcttccttccttccttcctttatttttttttaagatttctgttatttatatgaatatactgtagctgtcttcagacacaccagaagagggcgtcggatcccattacagatggttgtgagccaccacgtggttgctgggaattgaactcaggacctctagaagagcaatcggtgctcttaactaatgagccatctctccaaattaagttcttaataaacattttacatatatcgtggactttccaagacaaacatgctaactgaagtgggaaaaacagaagggtaaagagaattaaaatgattatctatccagcgtacgcttgtactgagtcaagagcccctggagagatagagcagacaaggcgggagactgctcccttagaagacctaagagtgtggctggagacagggaactaaggggccattcacaaaacagcaaagtcctgccagggctgcccgaagagaaatgacttaacccacgtaaagcaccttggattgtatcgcctgctggatagtgtcacccagccagcannnnnnnnnnnnnnnnnnnnnnnnncctgctggatagtgtcacccagccagcaatggtagaagtagggaaagccgcccctgttagaggatacctacccatgtctgtctgtggtgactcaaagttgatctgtgcatggatggtaaaacttgtcactctgactgggtgtgtttaaaatctccctgactgtggccagaaggaacccctatgctgtgtggactgccttgtttggcatagttgccagctctcactaggttgctctgtggcagtgggtaccacccaagaaagtgatgtcactctgcctgttactgtgttatgaggaatagtttatagtaaatatctgatatgtcactgagttccttagttgtatgtccattgttcattttccagtgaagaaacacttaaatctcagaagtgacttgtctaaggaaagttaaccgtgctgggatttgaacctatgtctgtgggctacactgccttctattgccaagtgttctttttctgaagacggggtctcactgtgtagctgtgcttggcctggaactctgtatgaagaccaggcctgccttgaactcagagagagctgcctgcctggaggttgttctctgatctccacatgcgtccatgtatgagcatgtatggtttacatgcacgcactagcaagtaagaacttttctttaagggatcgagtcaccctcagctttcttcatccatagtcccgcctcgtcctccctcctgtagattattttgaacacttcctgataggatttcatttatcataaccacactgtgtaaagagaatcagtgcttaggaggactgatttatgatctgatgcctcttcaggtagtagaggatagtaatgtcagtgtgtatcccaccctcatgctgaaggcaagtgtcagccatagctggtctattgagaggctgcctagtgttagtcccagcggggacagctctgtgatgagtgtgactatagctctaagaggtatgcgctgtctgttatcgaggtgaggacatggaggtcagagataactcttaaacttactcaggctcaaatagctcaatgtgtgctggagctctgaaccaagctgagaaagactctgtgtgtgtgtgtgtgtgtgtgtgtgtgtgtgtttgaggcagtatcattggaattgctgtgcagtgtgtgtgtgagtgtgtgtgtgtgtgtgtgtgtgtgaatgagnnnnnnnnnnnnnnnnnnnnatttctgttatttatatgaatatactgtagctgtcttcagacacaccagaagagggcgtcggatcccattacagatggttgtgagccaccacgtggttgctgggaattgaactcaggacctctagaagagcaatcggtgctcttaactaatgagccatctctccaaattaagttcttaataaacattttacatatatcgtggactttccaagacaaacatgctaactgaagtgggaaaaacagaagggtaaagagaattaaaatgattatctatccagcgtacgcttgtactgagtcaagagcccctggagagatagagcagacaaggcgggagactgctcccttagaagacctaagagtgtggctggagacagggaactaaggggccattcacaaaacagcaaagtcctgccagggctgcccgaagagaaatgacttaacccacgtaaagcaccttggattgtatcgcctgctggatagtgtcacccagccagcaatggtagaagtagggaaagccgccctgttagaggatacctaccatgtctgtctgtggtgactcaagttgatctgtgcatggatggtaaaacttgtcactctgactgggtgtgtttaaaatctcctgactgtggccagaaggaacccctatgccatgtggactgccttgtttagcatagttgccatctaccacacattgcaacatgccagctctcactaggttgctctgtggcagtgggtaccacccaagaaagtgatgtcactctgcctgttactgtgttatgaggaatagtttatagtaaatatctgatatgtcactgagttccttagttgtatgtccattgttcattttccagtgaagaaacacttaaatctcagaagtgacttgtctaaggaaagttaaccgtgctgggatttgaacctatgtctgtgggctacactgccttctattgccaagtgttctttttctgaagacggggtctcactgtgtagctgtgcttggcctggaactctgtatgaagaccaggcctgccttgaactcagagagagctgcctgcctggaaggttgttctctgatctccacatgcgtccatgtatgagcatgtatggtttacatgcacgcactagcaagtaagaacttttctttaagggatcgagtcaccctcagctttcttcatccatagtcccgcctcgtcctccctcctgtagattattttgaacacttcctgatnnnnnnnnnnnnnnnnnnnnccgcagagagagacagacatccatgacaagacagttcacagcagcaggctgctcatggctctgctctttaggggatgcctcccagaaatctttctttgctgtgtatttctgatgctagtggaaaaggctgtcagtgttttatgggaaacttgtcatgtcccctgtggcaccgtggggttccttggtgaaccacccaagaaaagagtgaccctctggctgccattattgtccagagtagtcatttggttgatcccacttggactctctcttacctgtgtatccattggatttacgtcttggaaactgagtggccacatcagtcccttgattcccacccacatggatccttatgaatctctagctcactgttggtgttcagtcttggaagccttaatctaagtgaccttgatagatccaggatattttgagtgaaatattatatttggtaaaaattatattgcatcataaaattacagatttttttaaaacctttaaaaatcatctctgacaacttttcacagttggcatatggcagtgtggagacttagagttaattatgattaatccacgtagacattattgcaggagcagatatagaagtcagtttgttcagctcatgaaccagtattcatacaacaaaagaaagaagaaagagctaggccttgcccacgcttattctcgttcattttctctcttcctcactcccgctccctcctactactccctcccttcccctccccatcaatgtattaatgtgctatttggcatgaagcaaattagattcatttttattcctttgtttgtttgtttttcgagacagggtttctctgtcttgtagccttggctgtcctggaattcactctttagaccaggctggccttgaactcataaagaaccacctgcctctcctaagtgctgggccaccacaactgagctacaagccaaggtctgtctgtcttccttccttccttccttccttccttccttcatttttaagatttctgttatttatatgagtatactgtagctgtcttcagacacaccagaagagggcgtcggatcccattacagatggttgtgagccaccacgtggttgctgagaattgaactcttaactaatgagccatctctccaaattaagttcttaataaagcatttttctcactgtattatacatatgtcatggactttccaagacaaacatgctaactgaagagggaaaaacagaagggtaaagagaattaaaatggggtttggggatttagctcagtggtaaagtgcttgcctagcaagcccaaggcactgggttcggtcctcagctccggaaaaaggaaaggaaaaaaaaaaaaagagaattaaaatgattatctatccagtgtatgcatgtactgaatcaagagcccctggagagatagagcagacaaggtgggagactgctcccttagaagacctaagagtgtgtgtggctggagacagggaactaaggggccattcacaaaacagcaaagtcctgccagggctgcccgaagagaaatgacttaacccacgtaaagcaccttggatcgtatcgcctgctggatagtgtcacccagccagcaatggtagaagtagggaaagccaccctgttagaggatgcctaccatgtctgctgtggtgactcaagttgatctgtgcatggatggtaaaacttgtcactctgactgggtgtgtttaaaatctcctgactgtggccagaaggaacccctatgctgtgtggactgccttgtttggcatagttgccagctctcactaggttgctctgtggcagtgggtaccactcaaggaagtgatgtcactctgcctgttactgtgttatgaggaatagtttatagtaaatatctgagatgtcactgagtaccttagttgtatgtccattgttcattttccagtgaagaaacacttaaatctcagaagtgacttgtctaaggaaagttaaccgtgctgggatttgaacctatgtctgtaggctacactgccttctattgccaagtgttctttttctgaagacggggtctcactgtgtagctgtgcttggcctggaactctgtatgaagaccaggcctgccttgaactcagagagagccgcctgcctggaggttgttctctgatctccacatgcatccatgtatgagcatgtatggtttacatgcacgcactaacaagagcttttctttaagggatcgcgtcgccctcagctttcttcatccatagtcccgcctcgtcctccctcctgtagattattttgaacacttcctgataggatttcatttatcataaccacactgtgtaaagagaatcagtgcttaggaggactgatttatgatctgatgcctcttcaggtagtagaggatagtaatgtcagtgtgtatcccaccctcatgctgaaggcaagtgtcagccatagctggtcttttgagaggctgcctagtgttagtcccagcggggacagctctgtgatgagtgtgactatagctctaagaggtatgcgctgtctgttatcgaggtgaggacatggaggtcagagataactcttaaacttactcaggctcaaatagctcagtgtgtgctggagctctgaaccaagctgagaaagactgtgtgtgtgtgtgtgtgagagtgtgagtgtgtgtgtgtgtgtgtgtgtttttgaggcagtatcatattggaattgctgtgcagtcaaggatgactctgacgctctgccctcacctgccaagtggaagggattatgaacatgtaccaccattgagtggatgctcacttcatgggcatggtagtcttgtttgttttgtaattatttcaacagtcttgtttcaagtgtggtctctaggctctagggggcctagaattagacttcttttgccattttcactgtagcaatccttagcaaaactgctaaaaccttagtgtaaacccaccttacactgtagtaggacctagttagtgccttccctctagccttagcctcaatccaccaacaatgtactaagcccaatgccttccctcaggccttagcctaaacccaccaacactgtgccttccctccacacatgcttacagcaagaaaggaaagccattttcacttaaaataatccttgacaagactgtatgaaagatgaattgtaatgaatgttgacttgagtacttgtggtgttcatgttttgtgtgataaaagtttccacagcacatatctgtccactgctctgtttgccttcagagagagcacactagccactggatgggatataattttgacatgagaaaaccagtagcaggcagtggttatgtaaacttggcattttctttaaaatgaattaaatgagctgacttcaaacaggacaaccgtgggtgttggttacaagttaagagctttttttttttttaattgactttgcttcctggtaacgttaccactttgtaatcctagcgatgctggtaatgaatgtagggtttggaacataccgtgtgattaaatatgtcaacatttaggagctctttcgtaaactcagtgaagcaatatttttcatctgactagagagttattctttcatgaactatattatttatgtccacatgaaaagttttcattcttatttaaatgaactaatgcatattttatgttactctcaattttaaaatctgtctgtgaaatttattgataaaaacgcactttggagtcctcagaaatcttgtaagagactaaaggagtcacgtggtggagggagacagttgttctgcagtgtcctctcagaagatggcgtaagtagagtgcacatgagtgtgtgaactctatcatctgaattagttatgtccttacttcctcccatcaatataatcaatacttagctatgcttgcattattcatttttccatttaataaatatttattgagaagatagttatcagggagttggagtagagaggggctatatataacccgtttttattctctggggaactcgtgggctcttacagaaccatcgctggcaaacgtttttaggtttactgtgcaccctgcccttgtatgggcagggatgtgtctgggctgtctgttactgggtactagaacccccgacgacacagtggcctaaatcgggctggcctcgtgagctctctcagtgttggggattgatggctcagctgggtggcgttgcacttgaggtctcgcaggttttctcacagagggtggtggagtgtgaagcacaccgggctggccgagagccacttacagggttgactggaacgccgcagttctctgggtgaccttgccattgaagcatggccatctcagtgcagccagatcctaagcagcgccgtccggggacagcaggaactgtgctttcctgcagcctcagccggtatctgagaccattgtttctagcacatttaccagtcaaagggggccatagggcgcaaatgcagggagacgcagctcgcttgtgactaccgtattaactttggcttcataaattattccccagtgtacctggataatgcatgactttattcttaagtctgggcttaaaataaaattctacgtttctgttcaaactttaaaaaatacaagctgacgccgggcaatagtggcacacacctttaaccccagcactcgggaggcagagacaggtgggtttctgagttcaaggccagcctggtctacagagtgagttccaggacagccaaggctacacagagaaaccctgtctcgaaaaacaaacaaaaaaaaaaaagtacaaggtaatttaaatttaaactgtagtttttgcatttttcttccttgattcatctttaatataaacttttgcctgttagtttctgttgagaaggaaacgctcattatgcaccaaggtgcctttatttacggccagggcataaactgggaatctggagaaggccagggctctgctggctggctgctgcctctggctcatggagaattgccttgaagcctggggtagctgttcagtgtgtcaggtagatgccccaggcttggtgtccttgtggaggagactggagaaggcgctgctgcaatgctccccttggtggcgctgttgcactgcggctgccaaggaagcagctttgggatttcaccttttccagcaagcatttcatttgatgcagtggtggaccggactgtgggctgggcttcagagaactaatcacactcagtactgtctcagaagaaaaaggcaagtacctgattaactaagtccaacacagtttcacagctgcctaagtacccagagcctgcgtatggcctgacttgcctagacacagtgtgctgctgtgctgagaagagctgatttttaaaggcacagtttcctctacatggggagaaaatacaatttacaaacttgactgaggtgtcattttcctgtcgtgttaggcagacctgttgctgggttcagtggctgcggtgtggtgtgtcacattgtagctccatgcctttggcaatgtgtctgtctgtctgtctgtctgtctgtctgtctgtctgtgggctgttgacttcatgctttgcagctctcagtgcactgagagacggagtgcccttgggaagaagggttgggaactgaaggagactgacgggaccattatgtggaaaaggctgcctggggacatggctcagtgggtgaggtgctggccccacaggcctgagggttggagttcagacccctcagcatccacataaatgcctactagatgcagagctcactgtaattccagtacttagaaggcagaattctccagagctaagtggccagccgggctggtttaaatgatgaagtccaggttcagttagaagatcctgtcacagagtaaggagagaaatggaaaagactgggtcagccccagtccacaattcacaaacagaacaccaaagtatagaacaatgtgtgtgtgtgtttgtgtgtgtctgtgtctgtgtgtgttgtaaatatggggagaataatactcatttgtctttacatgcagatactctcgaaggataatgagaagccaaagcaagtggttatggggtgggtagagtgccagactttacactggctgtttctctcctcttcctgtataaactccaggtcattgactgtcactttgctctctgtttgtatcccaagtacccacaacaatgcaagccatataaataataattttagagaaagtgtttgccccaaactagcagttcacagatgtcaaaaccatatatgcatattgcagaaaacatagacaagctggaagctctccatgatgccaacttccaaagcgtcctcactgcagtccctttgtctcctgtgctgggattgaatccagcatccagctcctctctgtgcaagtgctttgccactgaacgctgctcccaactcccacaagtagttaagctaatatcatggtatatgttactctagacaattttctgttcatttaataatgattttaaagtaaaagctagtctatatatatgaagaattttgtaggcaagttccacagtgtatgactcattcatgctccaacgtataaacatggtagtctcaaaatattaactgaggattttattaagagaacaatagcagtggagaggctccaaggcagttcctttttgtaaggagccggagctcagtgctctgctctcaggtcggaggggcatctacgcttcagcaagaagcaggggagagggttgcagtctaaggagagcaggttgaaggtgagggattgctgatccctcaggttgcctggctaaggcatacatgttcacagagggatgtctgcctctgctcacctgtcccacttacggttgtgcctcctgcatgctcatgcccaggacagtgagcacctctgggcaaccactccatgctctcccctatgtgtctccactgttgggtttcaaaaggtttgcatttagaattacccccacctctttttctttcggagttgttgtttatacagagtttcttctatccacatactggtttacttagagtgggacgtaattgatgaaactgaagctcttctgagtaccaatagcgtgactggaaatggccgtctgcatgctttgtcacatatgttgagtgtcttcacagaccaccctggcaggaaagcacgtgctggaagcccttccttcctaatggggttgaagtctcatttgttcaccaggccaggccattgctttcccgagccacatcccagcctccgaagggtttaacattatagttgaattttctagattattcagagtgacccttgagaagccataagacataggagaaatatgattaaattactatagtatttaggattttttaaacacatttaattgtgtgacatggcacatgacatgacagacatgttaaagacaattggggaagtcacttctccctttctactgtgtgacttagggattgaactaaaaatccacaggcttagcagcaagcatatttacctcctgagggtgttttcaggtaaattcttttaaaatgtatctcaggcagctcccaaactcactgtgtagccaaggatgagtgaactgtggtatctctgcctccatcccctaaactctgagattacaaatgtgtagacccaacaggttcatgcatgaagttccatgcagacactgacaaccaaactacattcccagccctgcaagtagtatttaattttagaaatcagctatcttatgttgaacattggatttctttaaacagttgttgcttacaggttataagaagagggtaatgtaaagattctagccttccccctccgtgctgtacatagccctccacactgcacataccccgtccgtgctgcacatagccctccacactgcacatagccctccatgctgcacatagccctccacactgcacatacccctccacactgcacatacccctccacactgcacataactctccatgctgcacatacccctccacactgcacatacccctccacgctgcacacagccttccacactgcacatagccctccacactgcacatagccctccacactgcacataaccctccatgctgcacatagccctccacagtgcacatacccctagatgctcccatctagatttgcagctccatactgcatttatgaagagataagatgcgtgtgatgatttcagggtttaggtattttccaagctacatgtatgtttttctttcacttgaagctgtctctctctccccttctttaccacctgcttatgttttgaggctgtctactacttggccttctggtatcctgtaagtaactgttaaccctgactggtccaaacatgggtagcagcatgatctcatgtcattttttttttaaaaagttcttagaattgggccatagactaaatactaagtttgaagtattaagctcctgtctttaagtgaaaatagactttccgaaaagctaagtgttctcactaaacctttctttaaaaagtgttctcagcttgaagtgatatttttctttagctctgtgtgtgtgtatgtgtgtgttttgtcttttaggtttttgtttttgtttttaaagacaggatctctctattatgtagctctagctgttcctagaacttgctgtgtagaccacgctggccttgaatgccacctgcctcttccttcacgagtgctgggattcgaggagtgtaccgccgtgcccagctccattgtttttagctggtggcgatgacactgtgacatgctggaaggatttcaggtagcatcgtcagggttagaaccatctgtccatgacagaaaagtgaagcaccttaaacaaagagagccatttctttccaggtagaagttctctgaggaggaggttctgccccggtgtccctgtgctggctggtttccgtttgcagctccttcagagtcctcggccccatcagcttatcctggacaagcctttatccccgtcctgaggacagaatggagcttagtgcagtgcatctctctgtcccagactttacaaggctgagatccaaatggtctctgggctcttactggggaggctctgggggaggacctgcttccaagcttgnnnnnnnnnnnnnnnnnnnntagttgaattttctagattattcagagtgacccttgagaagccataagacataggagaaatatgattaaattactatagtatttaggattttttaaacacatttaattgtgtgacatggcacatgacatgacagacatgttaaagacaattggggaagtcacttctccctttctactgtgtgacttagggattgaactaaaaatccacaggcttagcagcaagcatatttacctcctgagggtgttttcaggtaaattcttttaaaatgtatctcaggcagctcccaaactcactgtgtagccaaggatgagtgaactgtggtatctctgcctccatcccctaagctctgagattacaaatgtgtagacccaacaggttcatgcatgaagttccatgcagacactgacaaccaaactacattcccagccctgcaagtagtatttaattttagaaatcagctatcttatgttgaagattggatttctttaaacagttgttgcttacaggttataagaagagggtaatgtaaagattctagccttccccctccgtgctgtacatagccctccacactgcacatagccctccacactgcacatagccctccacactgcacataaccctccacgttgcacacagccttccacactgcacataaccctccatgctgcacatacccctccacactgcacatacccctccatgctgcacatagccctccacactgcacataaccctccatgctgcacatacccctccacactgcacatacccctccacactgcacataaccctccatgctgcacatagccctccacactgcacataaccctccacactgcacatacccctccacgctgcacgcagccttccacactgcacatagccctccacactgcacatagccctccacactgcacatacccctccatgctgcacataaccctccatgctgcacatacccctccacactgcacatacccctccatgctgcacatagccctccacagtgcacatacccctagatgctcccatctagatttgcagctccatactgcacttatgaagagataagatgtgtgtgatgatttcagggtttaggtatttttccaagctacatgtatgtttttctttcacttacttgaagctgtctctctctccccttctttaccacctgcttatgttttgaggctgtctactacttggccttctggtatcctgtaagtaactgttaaccctgactggtccaaacatgggtagcagcatgatctcatgtcattttttttaaaaagttcttagaattgggccatagactaaatactaagtttgaagtattatgctcctgtctttaatttaagtgaaaatagactttctgaaaagctaagtgttctcactaaacctttctttaaaaagtgttctcagcttgaagtgatatttttctttagctctgtgtgtgtgtgtgtgtgttttgtcttttaggtttttgtttttgtttttaaagacagaatctctgtattatatagctctagctgttcctggaacttgctgtgtagaccatgctggccttgaatgccacctgcctcttccttcacgagtgctgggattcgaggagtgtactgctgtgcccagctccgttgtttttagctggtggcgatgacactgtgacatgctggaaggatttcaggtagcattgtcagggttagagccatctgtccatgacagaaaagtgaagcaccttaaacaaagagagccatttctttccaggtagaagttctctgaggaggaggttctgccccggtgaccctgtgctggctggtttccgtttgcagctccttcagagtcctcggccccatcagcttatcctggacaagcctttatccccgtcctgaggacagaatggagcttagtgcagtgcatctctctgtcccagactttacaaggctgaggtccaaatggtctctgggcttttactgggaggctctggggaggacctgcttccaagcttgatcaggttgttgagaaatgtagagctgaggccacccttaccttaagtgctcagcctggtaggccaggggctttgagggctgtcccactcagagcggaccaccagtctgctccttgtggccatggaaagctgggtgtaggtgttcacaggtctcgatcacttcagctattggaggtagcctcccaggcatgtcacaagacgtcagctagtcaggctctgtggctctgaagtttccaaactggactccggacccacaagagctgctcaggcgtttgtgcctcaaatgtgggaggccctctgggggcttcctgtctgttcttcccacactcaggcacagcccttcttggaggcagagtggcaggctgagtatttttaaggcctctgaaggtctctttgctgttcccctgccccattctcaggacactatagctgtgattccagcgcgccagggaaatggatgctgtttcgtctttgtcttggcactactctgtagagggaagtgcaccagactcctgcagaccaccgtcttgcctcagcctgttctgcagtctgaattatatttgttatccctacctccttttttaaaaaatttggtttgaagtattgggaattgaatcttaggtgttatgcatgccaggcaagtactatgccactaaataacactccagtccctggtaactccatttgacttgcaagatatcctttttttttttttttttaacattagaacatgaccctctttgggtagggaacatcctgcctattacagtttcctcagactgaaactctttttagtgaataaaaggcctgttcttatgctttctgtagcatttcagatcaaggcactgggtagagaggagagacaaagactaaaaggtgaaacgaggcactgggtaagctgagggacagtttctagcagcttcgcagagctctcgtaagcacgtgcccgtgcttctgtggcagtggcagccgagaaatagtctttatcccgcagttgcccagctgagaaattctatgagaaaaaagggatccacgcttcgtcagggaacaacaaacagnnnnnnnnnnnnnnnnnnnncgtctttgtcttggcactactctgtagagggaagtgcaccagactcctgcagaccaccgtcttgcctcagcctgttctgcagtctgaattatatttgttatccctacctccttttttaaaaaatttggtttgaagtattgggaattgaatcttaggtgttatgcatgccaggcaagtactatgccactaaataacactccagtccctggtaactccatttgacttgcaagatatccttttttttttttttttaacattagaacatgaccctctttgggtagggaacatcctgcctattacagtttcctcagactgaaactctttttagtgaataaaaggcctgttcttatgctttctgtagcatttcagatcaaggcactgggtagagaggagagacaaagactaaaaggtgaaacgaggcactgggtaagctgagggacagtttctagcagcttcgcagagctctcgtaagcacgtgcccgtctctgtggcagtggcagccgagaaatagtctttatcccgcagttgcccagctgagaaatctatgagaaaaaagggatccacgcttcgtcagggaacaacaaacagcctctgccccgccaggtgcatttatctcactagaatccaagagaccggggccttagtgtcttcgtgagcaattaaaggcccttagggtcacattggagtaaaatcaataaataagcagtgtatgtaacttgacggatgaacaccaagactatccctaaaagagcgcccagccttgatttgtttttttctactgtatatatggcacagtgcttttacagagtaaatctaagtaattatgttttgaatgaatcaaagcgttatcccgtgtggcatcttgactgagatagagctgcagaggactgctttcgttcttgctattgtactgagcctgagctaagcccccaggctgtacccaggctgtgcattttaccatgtgtgcatctttaattcatataatggcttaagattttatctttcacaaggatattttgaaatacagtttaggaattagacattcactttaatccgggagaatgttggtgtggcttgctggagcaaggctgaggtgaggagacagccgcatccagcttaggggccagcaggggaggagattccagctgagtgaaggtcattgaagtgaggtcttaggctcaggcctgtttcaataggtgcagtaaccaaaggaccatcaagctgacatcaaagaatttgagaatgtaaatagaactgattgttatcataaaggaattgcttgttctttatttgatgtcaagaatcttagcttctgggatttttgttttcaacctctgtccctttgcctagcagcaggtgtaaaagcagacatagacactaaccattgggtgcacgctactgtggcccacttcagatctagttagtgcttagttgtgcttggacgttgagattcctctgataagttttcagtcccaggtacgctagtgcagaagcctgcttcagttaggcattccagtgtctgcttatttgatgagagttgattcagattgctgctagctctgaggaaccaggtaaaaatgtactcactcgactctattttgttttgtaaagtgatcaatctggtacctggtgccaatatcagtagctttcatgctaaacaacgtgggatagtgttcactatgaccaccttcacgtgcatacacaacacaaacacaacacacacaatataacgtgcgcacacactgcctactattctgccatccctgtgaaagaacgaggaggacttgggccccaggaaaactgggtaaaagtaaagaggtgccctcctgatcttagggtcacagagctgacctggagtgtggttatctggtgtccttcgtcagaaaccgtggtcttaaagcttgggtttgttgtcctctcctacaaatctctcattttctttattggtgacaatggggatagttagggctctgggacgtcctgctcttctcaggctactttgttagcctttcttctgttgtccaaatcgctatttcactccaattgtatttgtgtgtgtgtgtgtgtgtgtgtgtgtgtgtgttttctcagatggacagacgagtgaatagctaaggggaaaatagaacacacttcttgaaagatgtttcactaaggtcagtcttgggattcactgagtttttctgtggataacattcttagaaaaatagcattctttagtatatttatgaagtctgtgctttttaaaggtagtgttcatttgattaaactctatgttcatttaaaaatatatttgtgagatacaaactttggtctcttatttctgtgtagattattggcctttctgcctggttttgttgtttagtcttatatctgctctgtggaatattatctgttggagggtagaatatggattcttctggagaaagtcttctttattaattataagtcatctatttcagactgccaaacaaagtgtagtgagtgtttgaattaaatatttagtgcctcattgactctttcctgtgacttccattaagaccctgagagagaattcttctttaatcagcctcttgtctgctcggatgtgcaggtgctctgaatgagccgtggtggcattcatagccagggtgtggccaagctttccctcgttcttatgtcagcatagttcccgtggaaggaagctgggaaagttgtgtagttatagtacatagctctgttttgagactcgtgagaatgatctggggatggaaaaagtatgagatgtgagaagtgcacagacattagacggctgggtaccaaagatttttcttcacaggcaaatggctgagcttatgctctgtatcctgagtttcttcctccccatatacagtagtgtattcagctagcagaagatagctctgccatagacaaccattctttgtaattccttttgttgttgttgttttgttttgttcttcgagacagggtttctctgtgtagccctggctgtcctggaactcactttgtagaccaggctgacctcgaactcagaaatccacctgtctctgcctcccaagtgctgggattaaaggcgtgcgccaccacgctcagctcttaattcctttttaatatttagttacttttaatcacatgtacattcgtgagtgcaggtgtcccaaaggtcaaaggccccttggagctagaattagcagtttgctagaagccacctgatgtgggtgctgggaccccaactctggtcttctggaaggccaccacgtattctttaccacatgttcatttccatccctgttactaaatctcaaggatgcttagaatttatcttatttatgagaaaacatttccctcctcggtgtataactgaccagtagagaaaatcatgacctaatatttgccaccacaatcaaaataaggacaaattctgtctcgaagcagccccttgtgctactttttattaggcctttctgccagctcataccgctttctgcctatggccttcctctgccagtgtactggaaatggagtcttgagaaatctgtgctaaccctgttcctgtgtgtctcactcctttttattactgagcagtgttctgttatatggccgtgctgtttatgcattcacccactgaaggacatttgggttgtttccatgtgtgagcaattgtgtatgaagttgccataaatatttacgtagagatttctgtgggaacctaagtttccatctctcttgagtaaatactaggagtggtgtgtgtcagttgagtggcaattgctataactttatatgaaactgctcgatgcatttgcaacgtggctgtagcatttggatccctgtctgtatcccggcacttagtcttgtcttcccacgaacgccattttagaggtctgggtgctaccttgtgacttgatttggcagtgactggtgtcctttctgctgaaggtcagctccagttctcacccccacacagcagcttctctgggccttctctgttagatttgcagaattctttatttcactttcaagtcattttgctatgtatcttacaaatatatttctaccaatatgtgacatgtttctcctagcatcttttaaaaaattacagctagcataccctttcatttcctcctgatacttaactcctcagggcctacagtttttgcctaacctcttgcttgatacagcttgtaccgtcctagattcaccatctttttgacaaataatcaagatacaagttgtcttgcttgtcatttgtacctaggatggttatagtctgaatcttcacctagcctctaactactgagtaaactgttggctaactgatctcatggaccataagaaagtgagggtgagagggaagagtctgaaagctgctaacttcatcacagcaggagctggagactccagtctcctctgctgacctagagcttcctaggacttgctctactcccctggcgcaggtccctagcagaagcatggccttgccttcctgtctgcatttagtcttctctcaggatcttgtccattctctagaactacgcctttcatatgtaaagggcatgttgattattataatgcaccccagttttaaatttgtgagaaatactgtgaattttatgccagaaagtccaaaacaaggcatagaatgggactggtcccagctagcagttagctcaggttggcgaaccgtgagattccctgggccattgtccactctctaggagaaaatggagagcttccgtttgtgtgcctgggtggctcccgtgattgaaccctttgcatttctgcagagtggagagatcgtgtgtttggtcttgtgttttgtttttaaaaggcagctaagacctcagagaggactcacggcagagggttcccattgtcactgattgatggacctttgctccgtgctgaggaaggaggtgattttatggttatggttatgactccaaatcatatcccacccttgctgtggttgtcagaataatataaaggtaattgtgatgcgtgaaactcccataagcaagctaacttggagatggctgagtgtggagtgccggttttgccagttttttcctgtaaatcagtgaacaacatgcctccatcctgtaaatcagtgaacagcgtgctttccttgccaagccctgggccaagaactagggcaacaaaaattaaaactggaatctgccttcatagagcttatgctcgagtgtgtcggaaaggcagtgagcagtacagcacccaagggggagagcacagagatgtgcctgagggccaggggtctcacacagggcaagatggaacaggccactccagggaagcacgggccgaaacccagggcctggggctttaacttccctgtttccggatgcaaggagctgagcctaattttaggaattcaaaaaccaggcccactgtaacatactgggacatcacggcagcagctgggtcctcggagccgttaggcagatgggggtgttgatctggggagatccaggcagtcttctgtctgtctgtctgtctgtctgtctgtctgtctctctctctctctctctctcaaacacacacacacacactatgagtgttgtttccatgatgaccttgttcagtgtggcaggcatgtgtcacagcacctgtctgggtgacagggtcagggatgtggaaactttggtatacatcttcggtgtccatccatgaccacagttttaaaatgactctgagaaggtcctccgttgacaagttgtgagtgtgatttctctccaggagtacttactctgatgttttaaggaccctagtagaatttcaactcctaattagatagtgttttattttgaatatattttgcagcctttcagaagggtgtgacacaaacacctaatgtgtctcaggagagctggttgatttcatggttcctggttatcgcatgtcactgagctaatacttatggcatgtatggtgaagaatcaaaacttaatcttttgaaggaattttacagtagctatgaatccttttgccaagagggagtttgtaaaatacattgactttaaaagtgagcaagccttctgataatcataaaatgcattgcttcgctgttctgtatctttgtaaatgcagtctttccattgtgttcatagagttcctgcccagatattcagtgtggatgggtacctgtggtctgtagagcacttcggaatcaagttcacagtccgtgctgctgttccttcagatctgattccttcagatgacttgtagatgctttagatgtcaaccagacctgttctctggatcgctacttcattaaggagcatgtgcggggtcacgtttcccttccaccccagccctaccgagtccagtttggcttttatgggagtcagcacctcctttgttacaaggaggatcacagtgacattggaaacaagctaatcaaggaatacgcttcagtcagtttctttctgtaatgctccctgcatctgactcaagtgttggaagggagtgtgcagtgagtgtctgctttggtcagttttagacttagctagaagaccacgaggcgagcagacaggaacatgctattagtacattgaagtgcaacttgaaaacatacagcaaactgcgttgctgcaacccatccagcttcgcatgctgcaaggccacattggcggttacagagcaaacgtcgggaacggagagtcatggtatttcttttaaaatggtttctttgtccaatgtcaaaagttttgggttttttaggtttttgttttgttttgtttttgtttttgttttgcttaagcaccatatagaaagaaatgctacccacacctgcaaatacagattggagtatcttaaaaaaaacagacgatggtgtatttcatgacgttcctcctgcttagtcagtatttttaggcacctggcatatgacacttactgactatacatttttttaaatttattttcaaatgtctgatctgctttggcagtatgagaaaaaaatcaatatatacaactattctgtgtctgtgtgtgtgtgtgtgtgtgtgtgtgtgtgtgtgtgtagttttgtaaatgaaactaatcagatcttagactacaagttgaaattctcacattcttagaaacaaatttaagatgtaacacgactaactctgtacctgctcccaggtgtgtgtctgatgtaacaagttctcacagcagtaagctagtaacgacaaaaattactgtctcaatttttctatttttttttagtttctacaaatgttggtttaaggtttttattgctgtgtttacttctgaaataagcggcttaaaataggataaaagtacttaatggaaactttttaattagcacagaattttattaaatatatctataatagtcaaattttagctaacaactttatactataaagttagggctttcttgttttgaatttctttagcaattgagaaaaaagtttgcacaaaaggtattaatattgctgacagttttggggaatgctctttttactggcagtggggtatgtggttacctcatcccttgagctggctcctgattggtacatcagtacatggcctgttcttgggctagtcctccatactaaacagtctctgagcggttcatgctagcaggagttcagctccaggaaaaatggcctgcactgccaaggagtgacgtgattcaaggtgctctccttccactgtggacacttgacattcatcccggattttctgggttttatttgcttggatatgagaattttgaactgtgtaaaaatagtataaaattgtgtgtttcggctattttgtaaattttttggtttgtggaaatctcttgtaaaaacctaatgtatgtttagttcatatacatgaacaaatcagagaggttaaacatatctcagtgagtgacattcaagttgtattttaatgaacgctactttcatattagcaagaagacagttggttactagggacctccatgtggtaggttcctactttctgtgttatggttgataaactctccttagaacaaccatcctcctctttctcctcctcctcctcctcctcctcgttctcttcctccttctcttcctcctcctcccccttctcccccccctcttcctcccctccctccccctctccttcctttctcaccgcctcatccccaaatctttatgagaaaggtgtcatattttagctagcaggttttagagggtaaagaccccagtcagtcagtctcactgggtcagcctctggggaggacttagcagcagcaccctggctgcgtgcaagcatgatgttagagcactcccttgccagggccctgctcactcttactcatgtgaagacatttggagtctcttggaagatgccatcctaaatgaactacataccacccttttaaaactctttaccctcatcttaggaacgagccttcagcacatgagacttgtgacagacgcaggggacccatatccagactgtaccatccatagagagagaacttagacctgtccttggagaagatgtgcttgactgtattaaaacagatagtagggttctctttaaggattttattttttaatttgtgttttatgtgttttggtgtaaaggtgttcaaatgggtgcatgtggctgcccagcacagaggtgtcgtttgcctgcgtctctgaagctagagttaaaagcagtcatgccctaccagatgtgggtgctggggactgcacttggggcctctgcaggagcagcccgtactcctaactcctaagccatcccgccagaccctggtgtgtgtgtgtgtgtgtgtgtgtgtgtgtgtgtgtgtgtgtgtgtgtgtttgtttgtttgtaaaatgtttttttattcctcatcttccttaccactcaaaattctgtagtggttcatcctcctgtctctaaatttaatgtgattgggctggagtggtttcctcctagtgtttatagctgggttttcatccccaggattgcaataaataaatcctaaaagtagaatttttttttacttttttattttatttttatgtgtctgagtgttttggccacttactatgtatgtgtctggtgcctgtggaggccagaagatagtgtcagagcccctggaactggagtcacagatggttctaagccaccatgtaaaccctgggaatcaaggccctgtcctctggaagagcatcagtgtgctctgaagggttgaactatccctccagccctgaagggttgaaccatccctccagcccctaacaaaatacatttgaaataaccttatggggatagcaaatgttagttttctcatcaccatgtcttagtttgggttgctataacaaaatgccatcgagtgtatatctttttttttttttaagatttatttatttattatatgtaagtacactgtagctgtcttcagacactccagaagagggcgtcagatcttgttacagatggttgtgagccaccatgtggttgctgggatttgaactccggaccttcggaagagcagtcgggtgctcttacccactgagccatctcaccagccccgagtgtatatcttataaacagcaaaatgtgtttctcatacttttggattccggaaagtctagggccaaggggagagtggattcattgtcttatgaggaactacttcctgggttttagttagtgggttttggtttttgttttctctctatgtccttacatacaaaaaaaaaccagttctcgagactcttacaaggacattagtcttgtttacgaggctgcactctgatgacttcatctagttccagttactttccaaagacacagcttcctaacactgtttttgtggcagttagaatttcagcacacacacgtcaaggggacctaaggaaatcagagcagtccccatcctagttatggatactacggctttgataagacaccgtaacaaaagcaagttcaaggagaaaggctttatctggttcagtccaaataaacttcatcaaagtccatcattgaaagaggtcaggacaggaactcaaaaagagcaggaacctggaagcaggagatgatgctggggccatggagggtactgcttactggcttgcttctcatggcctgcttagcccagcgatggtcccactcacaatggactgggacttccccatcaacctcttactaagaaaatgccctctccaggattgcctattgccagatcttggggagacattttctcatttgaggtttcctcgtctcagatgactcgagcttgtttcaagatgatataaactagccagcacataccccaacccatcttctttccccactttctggggtgaccatagccactcccaccttcagaactaggcagccatttcttctgggctctacggcatgtgtggtgagtcatacactggataatgtcttgagtcttctcaggttcacttcaaatttcaaaatggaaaccttactttttcctggtctttcttgaccagattttctcattcctgtcttagtaaaataaatggccgtacctttcatgtaatccagaaacccaggactctgttctttaccttttctgtccgtgtccagttcattaccaaaccttggcaataagcatgcctcaaagccatctatcctctgccgtccgaggtctcagcctccacccttcccctgtggactttcctgggtctgctgggaattctccctctgcagtccatgagcagaccgatcacttcaaaggcagagctctgcctgatgcactccatgctgagatcccacctcccccactcctcaaggggagctcccaccatgttcccttttctgtggtctctttgttgtcccttctgttggatgacgatgactcctcctcctcttcctcctcctcctcctcnnnnnnnnnnnnnnnnnnnnccctccctccctaaagctatgtgcatcctttacattttgtctaaatctttacttttacaggaaaaaatgttttgctacctatctggtcagaaaaagtttctcatctgtaacacttgaacataaccatatcaatttttttttccgagatagggtttctctgtgtagccttggctgtcctggaactcactttgtagaccaggctggcctcgaactcagagatctgcctgcctctgcctcccgagtgctgggattaaaggcatgtgccaccacgcccagcaaccatatcaattttattattagtcctaatactggcagcagttccttagtgctatctgatagcaaatgcatgtccactttatacttgattatccaaaatgtcttcattttggttagtctagaacaggaccctcatatgatcctcacacaacatttttatttgtgtcttagatattatgaggtagatgaactacaaatgttcattgtcctactcttttaaaaggaggccactgctttgtaatctagtacagcgtcccttcctttcctgctgcttgctttctaccttctccctgtccttgcttctttcccttctttccctcctcttttgagacagggtctctcacagggacttcacagggcctccttgattaaacaagactggctggccagttgtcactggcttctctgtgctgctccagccctgagatgaaagcccgagccaccatgagccgaggtttctgcttgcagaagaactttacaaactcagctgtttctggagcctctttttgcttgccttaactcagtttcttaactagttaacagacggaccatctcacagactctggattctggatttgtgctcttgcttcttccctcccttttgttccttctcattaatctctcccatgaactgaaaattcatgagacatagtctcctccagaagacagataatcaaattcagttttattcctgttttgtcatacttgaaatacatacaatcacagtgggcatggtgagacttccagcatacacccgatgatggtgtgacacttgagtttagattttacttccctgttactgcctcttctacttagtgacctttgaactactgatttctgcctgtcaggtgagttcctcagttataatattgagcactgaatttctaaggtagaatcccccaacagcactgcttagttggttagctaggattgctgcttatttttttcttttaatattcaatatttaattttcagaaacagatcctgattcctgtcttaactctgaaagaaaccagtatattttcatttggaatttctcatgtttgcttcaccttattatgaatcctaagatttgtatgtgtagtatacatatttcagttacttgataactaatcaatcatattttcatattcatctttgcttgctggaagacgtggcgatttggcagaagcccagtctcctgtggtagtttcttcttttgtttttacattagtaggatgtctcgggcacatgtatgttttatgtctacaaacaatctttcattgaatggttttttttttgtttcggtttggtttggttttggtttttgttgaagtaatagtaaatagtgctatgaagagaaaccatggcacacttagatattatgtttagaagctataatagaatggaaacctatctattatttattttcgtttcttccctagttgctttggcaaggacttctaatcctatgctgagtagaaatgctggaattgggcgtccttccttttgctagacttgggttttcctctgagtgtattgttagcagagggctggctccctttattgtgttggactcttccattcccgctaaatgcctgacctgcaagagtttcaacttaagagaatatttttgataccttttccatgtgtaataaggcaacatgaactgtatggctgtgtccctccattctttgctgtagtgcagcatgttattgatttgcatatgtcgtgccatccttgcattccagagagttcatcaggatgattatcactttaggatactgctcaagttcactgggagtgtttgattggggatttttgcagctgttaatcaagaacattggcgtgtaattttcttttctcatatgtctgtcaaaatattttatatgtgttagggggatgtgttaaacctcctcggaggaagggggagagaacagataatccaggaaaggaagcagaggggaagaaagggagnnnnnnnnnnnnnnnnnnnngggggggaaggagacaaaatggcctgagtgtctaagtcgaacctaccttggtaacatcgttttcctgtaatgttctttaaacatgtaagtaaaaaaataactgcaaaaatgtcactctgaaaacatgttgcaattttattgtcaaagcacagtaaaatatattactaggagacttcactgtagcgttctcttcaaacctttcttttttgcctgttttttttttttttttggcatggtttgcagacttgaatgttgttctaggacagaacattttagaagtgcaggatatcaagtaacatgtcagaactgtgcattgcataatctgggccatgttggtgtaggaaggcatgcggagacttcttgttgtgagacgggtttcatgcgcagcagggcctgatttttttaatgggctgactccagaccacattcgcttatttcccacgctgtagtcctctggttcccaacacttatacagaggtcagaatgacatgtcatggctctagatataaactccatagtctggagcgcctgacacttggcatatgagagatactagtcctctttttttaattaaaaaatacattcatttgatgtcttagtgtttactttttaaaatattttatcttgaaattggactcataaaacattgcaagaattgtataaataatttccattcacatttccccagattttacacacattaacatttaaccactttttcatcattgtgtgtatctcttattttgaaatgtttaataaaacaaaaagcccacccacaaaacctggaatccattctgtgttggctgacagctgcagaacatggggcctgccctgcagtgaggttggtacaccctgtgcaggcattggagaaaccgaggcccctttcccagcaggtgtcagttgccaatagcttctgagtgagtgaggggtgggctttgtacccacttcctgttttccatgctggggtttgtctgggttgaacctgtacaggtcttttgcaagctgcatatgtttcttaaaaataacagcattctcaaaataagaaattcaacactgccagacatggtagctgtagtggctattcctggttgtcaacttgacaatatttggaatgaactacaatccggaattggaaggctcaccagtgacccttatctggaggcttggagatccttatctgtatcttggtttgaagatcttgagccatagtggctatggattccagaagattgaatctccgagtttaaggaacacacctttaatctgggctatgcctttcatctgggattaaagggtgtggtggaacacacctttaatctgggctacaccttctgctggagacaatataaggacattggaagaagggagtctagctcttgctcttgctcctttgcctgcttgctgcgtgagactgagtaactgctagatccttggacttccattcacagctgcgactgaatcattgttgggaattgggctgccaactgtaagtcatcaataaattcctttactatctagagactgtccgtaagttctgtgactctagagaaccctgactaatacactctgtaaaacaggctagctcaaattcagaggtccacctacttctgcgtccttaattctgggattaaaggcttatagtagcacctcatggctaaagtagattttggttttatttcttcgatttggattggttttgagaaagagagtttccctattttacaggtttccctgttccacactttaacctgtagatcagtatgggccctataggtccacatccctctgcctgcagggtgctgggattaaagttatgtgcaacccatcccagctctgctttaattataaaacagatccttagtcaataggcttcactggttaataattagctacttagataaagctagccttgaactcactgagcccaatctacctttgcctnnnnnnnnnnnnnnnnnnnntccttatctgtatcttggtttgaagatcttgagcctagtggctatggcattccagcaagattgaatctccgagtttaaggaacacacctttaatctgggctatgcctttcatctgggattaaaggtgtggtggaacacacctttaatctgggctacaccttctgctggagacaatataaggacattgtaagaagggagtctagctcttgctcttgctccttcgcctgcttgctgcgtgagactgagtaactgctagatccttggacttccattcacagctgcgactgaacaattgttgggaattgggctgccgactgtaagtcaccaataaattcctttactatctagagactatccataagttctgtgactctagagaaccctgactaatacagtagcccacattttaattccagtacctgggaggcagaggcaggcagatctttgtgagtttagggatgcctggtctacatagttagttctggaacagccagggctttgtggagagactcggtctcaaaaagcagaaggagggagggagggagggatagagggacgcaggcaagaagaaatttaacacaaatttcaaaaatatatattgttctgtatgtatgttctaatatttaattgttttcatttgcccacagattctttcccaaaacaaagcaacagaccccacccccccccaaaaaaaaaaaccatgtgtttttgagaggagctagagagatgactcagtggttcagagcatttactcattttgcagaagacctaggcttgagtcccagtacccactggtaactcacaaccttctgtaactctagtttgagggaacctaataccgtcttctgacttgcgggagtcccaggcacatacatgggtacacacacatacatgcaggcaaaacactcatacaatgtacatcattcatacatacatacatacatacatattcatacaatgtaaataaataaatctaaattaaaaaaaaattctcgggctggagagatggctcagtggttaacagcactgactgctcttccagaggtcttgagttcaaatcccagcaaccacatggtggctcgcatccatctgtaatgagattcagtgccctcttctggtgtgtctgaagatagtgaccgtgttctcatataaataaactaagtaaatattttaaaaaatgtattttaaaagattctccttgcccccacagtatgggatccagaacccagagtcacatgctagagttactgggcctctgttttgttctttaatcagaaacagacccttgctgtttgtctcttatggctctcaaaattaaaggacactgaagcatttggatttctgtcttccctcaagagcagattggctctactgaggtcctgtggacactcatgacgctagcttgtcctagtcttggtggtaatgttggcttccaacacttccttaaaatgatagcaagttatatttgataagcatttttttagtattttcttgagttttaattctttaattcttgagtcctggagttcttaataagatcctatacttctttgggcaacttctagactgtcttatcttagatgtgttagcatcttatggcagttttgatggggttcttctgttatcgaatgtgtcctgtcctctgacagtgtggtaacaggactctgtattttgcccccactctctcttcatagtcagcacggtcacacatgtagaagactggtacacagcacagttacacatgtagaagacttcacagcacagttacacatatgtagaagactggcacacaatacttcatacatagtatttggctgcctggtggatggtgggttagttgttaatgaatgagtgatttattgttttcaaacctgtccgtttattagttttatttggggttttgtacattttaaagaaaccttttacccacttggtaactttatatacttttgggtgtagttctttaagatggttttcatagccttaatatcattttttcaatattttattagatattttcttcatttacatttcaaatgctatccctaaaagtcccctatacctgccctgctccccaacccacccactcccacttcttgaccctggcgttcccctgtactggggcatataaagtttgcaataccaaggggcctctcttcccagtgatggctgactaggccatcttctgctacatatgcagctagagacatgagctctgggggggggtactggttagttcatattattgttccacttaattatcattttgtttgcgttgtcagatctgttttgtctatgtgcatgtctgtgtggcatgtgcagagtccagaagagggtgtcagatgccttggaactggagtgacagacagttgtgagctgccactgggtgctaggaattgaacaaggagcctccggaagagcaatcaggctcttaaccactgtgccatctcgccataaacttgctgtgttttagtggcctacaatgtgccaccagtgaaattgttctgacagtaatagtttttatcattcctcttattttgtttttattatattacttcaaaactttaaagggtttcttttttcttttttttttttggagggggggtggtagtggtggtggtctgtattgtttatagaactaggattatagagaccaaatacccagtgttatgagccagcctagaccacacttgtggccacgctagacctggcattttgagagtcctgagtcccagtccttgtcccctttgtctttcacgttgtaatgttgtcgttctcagatgtcactgtgaagaggcgctgtctcctgtttccttgctctaccaggtcgattttattcggctcgctaatgacaccgtgatacgttgaggctttgctttttacttttgttttaaagagaacatttaggattacagtaaaattgaacagaatttatagaggattcccatatacctcctgtccttttcaatcctctctgctgtctacatgctattccagagtggagcacttgatcaacacatgaacccgtgctgacaaagcaccaaagcctgcatagggttaaggctctttgaatttgggcagatgtgtaatgaacagtattcatgatgaagtcttgctgctttgccttttcaacattgccttccctcacaactgtgatctgtttgtagactgtagttgcccttcctagaagttcatctacctgaaatcatagcatatacttatgaattagctttttcctagtaatgtacacttcagttctcctgtgacttcccagtagcccatttctgtctagcaccgagttgcctgtggaaagataccttatgactaaaagtgccgtaagcgtttatgtgttctcagtgcccatgggcacgtttcaaggcacacgatgggtagtgttgtaagagactgctcctctgccttctgaggcagctgtaccattgtggagttccttcaagcagagtgagagtcctgctgccttctgtcctcacccaaatgtagcatctttggttggatagcagttcctctactaagcctgtagtgctacctggtttcaactcgaacttctgtaacaccatgcagtgtagagtactgtctgggtgctcatctgctgtctgtatgtatctttggtgaggtgttcgttcggatctttgcccatttttgctctacccatttgtttcttattcatgctctcttagcgacagctctacccaccagcccgccccagaaccatgcagtggagacgcacagaaggcttggagggtagaaaggatgatttgtttttccaaagaaaaacgtctttcttctgtttctctccttttgcctttgtctttcagttatacctgccgccacttgcggagatatgtttatgtgttggacagattgtattccccccgctctccctgttccgcacgtcagcgttgcttctcggcccccagtgacaatggagaggaactcttgtctctaacttgctctcacattctcagatcctatgcctccaggttattaacctctgctgtccatttactgcatgctgcatgtcgtgtggcctggtaattgcatgctttaatgggacacatatgaattgaaaaaggtgaagtgttatgtttaagatactagcaagtaatcaatccctgcaacgttttcttacaaaggtcttcttaagtttatgtcctgggagaggaggcagctttccaccaggacagacactgtatactctgaattctgctcccttccagatcttttctttgacttgcgtttgttgcggtgctttgtctgatgggtgtctgagctgtgtgctgcttttcttggtgtacagcacacctgagagcccactgcaggactccacccatctcctatggctgcactcagttgaacggccttgactctctaggatggtagaaatgactcctttagactctatggtcattactcatttactactgagaagttaaaaagccaggctgcaccaagttttaggcaagcgtaaattaaacagagagaaggtagatgtgtaaagacgcaggtggggtatctcccaggtcagtgaggatccgcagctgctgaccgtgcatggtgccaaaatggagggcaatataacatgactgcatttcctgtaagtcagaaatgacttgtgcctccatactctagctggagaaggtgatttaaggcagtgtcttcactgccaagcgttttaaaggagaagggaaaactccatggcaaccttaaacacaaaatggcaaacatctgcctctcggttgacctttgcccatgaaggagcatcagaagctctgaactgtacatggtgtctcggtgaaagcactttattagggaaggaaaaccgtgtggctctagtggctggtttttgtagtaaagctcttacagactcatggtgacagtgtgctatagactctttggtggggggagtaaaaacaaaataaaataggctcttcgcttcctaatatctgagaacttagcacacaagccaggtgtaattgcggtgctcaggaggctgcagtcatagaatcgcacgttcaggacgagacagctagctacactatgagacccaatctcccaaacagaaagaatttaccaaagtaaaagccactggcttggttggaggatttggagacagagcttgtctgattgtgcataatggggagagttgctgttcatcattgaacccccaagttgtctgataattgaccttgcttctactgacaaagaagtatatcatgtggcagggctctctgcaaactgatgagatgggtgggggagatgatattaaggaacagatggctctatgattgtagcagccaggatatttgtaaggtaggttaacaggctggccattcaggcaggcactgataatgcagccctgtgttccaaatccacaggcaggtgcttcttgtagtctggaagcagagctccttcttgcttgcgagacataatgattggttacatgaaccttgtcatatatagtcaagctactctcttgaagtcagcagagcttgtgtgtccagcttatctacaaataccttcacagcaacatctagtgttttaaacaagcaaaccccttagccaagctgaacttagaggtaaccatcatactgtattctggttttctttgcatatgctgaatttgtcctatcaccctgcaagcccctgaagtgaatatttaatcttattcatcgtcatcatcttccaccctatggtttatagcacctcgaacatcgctaaccctcactaatatcattggcagcagtgtcctaccctcagccacttgtgaaactgtgtacttgccattgggttacatgtcctgatctgctggagcagagagaaatagacaaaagaaagggaagggagtggaccacccggggaagatactgagggaaggatgaggggcgagaacaaaggggcaagcgggcgggcgggaggagagggagccttgctgtagagcagattgcttcctcagcctgagctctggcagctagctgtctccacgtgcaattcggaatacaattctgggtctactttcaacttccctcactccccaccttcaccttgccgacctctcctccctctcacattttgctttcttctcaagtaaggtttaagatgtcagctactgaagggtattttgatttccactacaaaacctccctgaggttcatgcaggccgatcatgtatctgtaatgaactgccaggcctggtcagcctaggttggtgcctgaggaaacactgtggggtcggaatgcttcctagtgcttggaaacatgttttgactgttgtccaagagtttccacctccctatcccattcctggactggttaccagatgtactgccctgggcctcggggcctgccaggccacgccagtgtgacagctcggggacatggagctcaggcctctcctgcggcaactctcatccccagcctcacccctgcagggtagactagggcaggcctgtggatgagatgcgcgtgtaagagaaggtcctggtcaccctgtcatgccacgctagtttgcaagcggctgacgtcctgtatctgcagtgacacatgctcaagcatagcctagccccagtggtagagccgttcactcaacagtgacactaaaggacggacagagccagagtcggaacagagcagtcacagacactcacagaaccaagtggcactgttgtgtacagcgtgcttcctgtacagttagttcctagagagtgtgatagtgtaagtgtgtgtgtgtgtgtgtgtgtgtgtgtgtgtgtgtgtgttcaagaggaggctaatgcagtctgaaggacatactgctgtgaggactgatggagcacgggcacgtcactgacgtctcttcccagtgtcagagttctgtgaactcagagggaccgcctgggctgttcctcaaggaggagggagggctctgctgctgggctagaaagatgctaggcctgcctgccagtgatccccaccagtccttgccctgtgcttgagagagacacacagatgtgtggagccctcggcacaccggacacctttgggattctgaaaccacgagccctcctctgctcacacaccgtgcgtgggtcctttaagcatcttctactagcgggagtttgtcgagtcttcttgccttcctggtcagggtctgttgggtagcactcgtagaccttggtatccaagaccgagttccttatcgcagttgctgtgctttgctattgtgcctttatttgtggacttatcatttcctgccagagtcaattttttgaaaataggaatgatttggtttgtatataattctcagatcctttccatgaacacatctctctcgataagtatatttgtctgattgtaattgcagggccctgtattatccaaatattctaataacttaatgtgtggtgacagggtctttttagggggaggacatagttcaccaagctttgtgcctcccacatctggaaactcctccactcccaaccctgggaatccttggatcacttttcacgctcccagccctagatgtcacttgtgttgaaactggattgagaatttttagtaactgggaatttgaatgcattgttagtaactacacaaagtaaagttaactatatatgtatgtatgtatgtatgtatgtatgtgtcaaatatataactgtgtactactgtttcagttgcggcagaggcagtgagtcgtcggaggcgttgtatgctgaggttctttgttgtaaggacagttgactttgagttctgctaaattttatggtgcttgattctaaggtgctgagaagaaaacaggaatggtgaaaataatttcttttgtcactttggcttttaaatttggggttcccattaagcatgttaaacaaagtggcattgacttctgtctccaggtagtacgttcttggctatgagcactaatcatgaacttctgggagtcatagaactcttctagactctatcaggaattgtggatgttatgttatgtggcaggaaaaaaacacctctgaatgtagggttttttttttttaatggagctgatgtagtttaaaatttttatgtatagctagaaaacagagcccccacccccaacagtagattagacaagacattagcagcttacttactgtgtaaaagcctgagcaggggtggcagctgtgccccataaacactttacactcagagtccacctgccgtgtcccccagacgcctagagtcttcagcctcatctagagtctgggatagctcactatagagtgtgcacagcacacagtacgagatggaaggaaatggcatcagatggaaattgctgtttttaaggtactctcactcatctgagcagaggttagtcacaagtagccaacctgcgcgaagcacttaaaattgagcctttagcagaatggccatgtgctggggtagaagtaagctgttctgggctcctgaccaccccagtgctgctactgcaggggaaaatcacaggtgcctccccagctatcgatgtttgtggtccaagataagacaggattattggcttaaaaaatcctctgctttggactgtttctttcatagaaaacactaagtaaaaaggaggtaccttctgagaggccctgaggcacaaggtgtgaagtaagaattgatggtaaagcttcattagaacaggtcagagaactcgggtttcagaggccacttacagaggcacatggtgcatctgaggcagtgagcgttgtcttctgtcagagcagaccgacatgggattgctcggggattttgttgtttttctccagacaggtttctcctctaactcactgtgtagcttcaatcctcctgcctcagcctcctttatactgtgcccaggtatatagtattgtatccaggtaagtgtagtgttgtctgaagtatgatgctccaggcttgaagtgcttgcgtttgcttagtttgctcctttggtgtctctttatactgtggtttttaaaaagtcacatctggtgccctttttttctctttcaaatatctacatcttcatctggaatctaagacagtttctaaaaagagtttcctcaaatgagctttctaaaacttctagaccaatcttgtcttagtgtacccctcacaaaatctgtaatgtataataagtatttgaagccatagcaataatttttcatgcatcggatactgtcttaataattctgttgtggccgtatgccttattgatttctgtgccgctggtgtggtatgaaatgaaatgtatcttcccacttaaaccatcatggtttccttttgaattacatcctcggcacttgatcttctcatcaggctgcttacccctgtgctctgagatgctctgctcagccgtgcggactttaccgcttgtgctctgtggaacataaatcaataccagacaagtcagtccacattagaaacgtcagaaagaaaacacagttaagccgttaattgttagaaatcacctaccatagggtgtattctgcttcagtttactgtcttcccctcaagactgactggtgtcctggagacagagtgcagatcctgagacattgggccacgcctgcactggtgctgtggccagatctaggtcttggctcccatgccttttgccatttcttttcaagactttttgttgtaaatgttagaattgcttaaggtctctcttcaggtgttctctactcccctcaccctgctcccacgagacagctgtgtcgtgctgtttgagaggggctggtgcaggccaggctgacctcatggaaactcacttttctagccaaggatgaggttgaactgctgagtctcggccgtcaccttctgcgtgctgggcctggtttatgcagaggtagtcggtgaatccaggcttctccaatgttagcaagtgctctaccaactgagctacggccccagtctcaatagactgttgtcgagggcaagagggtgtgtgtgtgtgagggggtgcatttgggtcttgcatgtgccaggtgagtgctgttttgcttactcagacctatgtctgtgtttagtcactgatcccaggcaccagctgtgagagttggctacttgatagaagaaaccttgtatttgctgagaatgaacgattttaggttcctgaaagttgattcgttttctaatcaccacttcctcaaagattatcttgtctagttatgaaaaggtagttgtcttattgtatcactgtgacatctttagggtgcacctgaggatcagtggatggtcggataatcaatctctctctgtttcttgctctctctctctctcgccctctctctctctctcagagagagaaacagagacagagagatttttaaaagatgaagaaaagccacatgatgagggtcttaagttcttctggaatatgtaagttatgtaagttgcagacttttctccagtaaaagattttacaaattgtccacttattaaggctctggtaagccatggccgtggaggtgatgtcaacacactttgaaagactccttctaaaaacatgtgctctgtagctccaggaagcagaagagcacagagagaaggggaattatcttaaattagctttgtgtcattaaattaaacatagcactaagaaataatttctaaacaggatcacttagggaagaaagggtttactcagcttccacagcactgttcatcatccaaggaagtcaggacaggaacccacacagggcaggaacctggcggcaggagctgatgcagaggccatggagggtgctgctcactgccttgcctcccatggcttactctgtctgctctcccccatcagtccctaattaagaaaatgcctaacaggcttgtgtaaagcctgatcttatggaggcattttctcaattgaggctcactcttctcagatgactccagtttgtgccaagtagacagttacctgtatagtaaggaataaaacataccagtgtatgtgttaaaaacgttaatttatgtacgtgtgcatgtgtgtgcatgtatgttgcgtgcatgcatgtgcgcacctgtgtgtgtgtgtgtgtgtgtgtgtgtgtgagtgagcgtgcatactcatgcatatacatgtagaagccaaaggaagacattgggtgtcttccgttgcttctgttccatccctttagactgggcttctcactgaacctgaggctcgtgctttggctaggctgacctgccagggagatcctgggcctgcctttctcctcccccagtgctcagccttaccagatctctttttcttcttctttttaaatgtgattactggggattcaaactcagacccccatggtggcatagctctcactcttccccactagtcacctccccaatcctgatagaaaagctaagctcacactgtgcacagttagaagtgcttagaaagtgtcttccttacaggaaggttggtaaatttttgtgaacaccaaaattaacaacttggctcaacataaatgttataagggcccatcttggtgatcttaaaaaacaacaacaacaaccagacacccagctttactgtatacaggtgaccatccaaaggggaaaattttggagataaactaattgttaaactatagcaaaaggtgcctattaatgatatacatctttatcccatgggaagaatgaataccctgagcgttatcacccaagggaacagagttaagaaggaagggtatgaagtttccatttgccttttggtttggttttgcactatgtaaatactttatttcacgtcagccagggctccgtcccaggctgcttcataggctctcgatgggctgctggggccagtaccggtacttcttcttgtccagcttggcgtctgggaagatctcattcgagtcatcactggtcagctggtcaaagggaattgtgttcctcgttttctccagctgcttctcacactcctgggtcctgggctgaggtccagacgcaaactcagcacagctcttcacatcccccgtcccctcctgtccaccagggctgtgtgtttatcctcaggcacagagatcttcagggcattatactgcttttcaaaatcatccaccaagccaggcttggccacattggccttgtagaaagcccagtcaatcattggtggtttctcagacagactagccaacctggtgtggagggtctctttccaggactttagggcacttccaattgccttctggttttggggtatgagctccacacaagatacccaatcactggtttttagagcaagtttatgcccagccatcttgagatactccagcagagcgctgtttctccatttgctttttaaaagcagtagtctatcttttatccaccagctgctttttaggtgataatttccttggtcaaggagacaccatagccacagttgatatgttctgtgggtctgtaggtgtggtcagagttcctggacactttctcatgcaatttagactgtgcgtacagacaactggagtgcacatagagctccacatgttggatgctcttcccctgcggctgccatttgcagggaatgtcatgtgcacattcagacacgcagacttgcacaactgcttattagagaaatattcttggttactgagtgtctcacagagttaaacatacaggctttcccatatatggaagaaaagtaattccacccacttgccatgccttggcatgtcatgatgccagcccttcacatttctttgacttcccgagcttaaatagacagtgatgtaaatcagcagttaaagctgcacctaccagcccttggtgactaagccatcacacggctgaagaggaagggagagccacgtcagtttgcctgcacagtggcagtcacattcagtctaaccccagccttctgagttacagtgacaagattatttatttctaggctacaaaagatgaggaagcagagagaatccaggaagttaggatggctgggcagagatccgaaagctggcagtaaaattgcagtcttcctggggtccctgttctgatcagacttccatcttcctgactttacaatgtcacagcattgtaaagatgagcatatctcaccacgcaagtactccatgattctcaacagataacttccagtctcagggttttgagctgggtgaggtcctgcatgtctttaatcccagcactctgcaagcagaggtgggtgggtctctatgagttcaaggccagcctagccccagtcatccaggactacatggtgaaaccctgtctcagaaaataaaaccaaaagagatttaagttttcagctgttacatgtttcactgtttcctgtctgagctgaaatgatatgtagcatgtttccatgtgtgttctcagcttgagcttaaactggcgtgcatttgcatatcacagagagctgtttataagagctagctcattaaaatttaattttaaatgaaccttagctgtaccgtgtggatttttaaaggttgcacgtgatacagtgtgcccatgtgcagtgtcctcattggtaataatgctggtatttcctgatctctccaacaaatgcgactctaatgaacaattattgctttagtcttcaacataactctatgcgatgctaccttatactcctcctgtatgggtaaggcacagagtgatcatagaaactgccgcagtggaggaggcaccgatagaggtggatggctttgccctgcactgtcctggctaccatgcttgtcacagaagtctgaggcaatttcagccaacactgaagccactttcaaaccctgatttattagacattttagccatattgtatctaaagttgaacttgttgtgtacccacttacagttgagtctggatttagactctgtaaacaggaagcgctattttgttctttgaacttctgtgtagcatcctagagccagctgctcaacccagacgcctcctctccagctttgctcagcttcagctccttatgctggactggaggcgtggctggggggggggggggaccaagtctgcctcttaactttccgtagaagcttgaatattttggttctcatagtagagtgagtggttgtgagatactcatattctctatctccctaaccttttccttcctgctccccaccccatagttgctctctcttccagcactggctttttgtttggggttgatcctgttgttccccacccccacccaccactgtgctgggattgaaaccagagcctcacacatgttaggaattgctctcccactgaaccacatcctaggcctctcagatggtttaaccagattttataacataagcatgtatctagacttccaaggtagcccaaaggataagtcctactgttacctactactgggagtcagcaactgaacatgatttggaatggtggctgacaggtctgatttccttgtcattcccctgtttggtgactgagtgactttaagtaaacagacagatgtggctttcctggggatttggtggtgtctttaatgatccccgaaagtccatcctgtacagatagctacaatgatgcttagtgtcatttctgcaaaatgtcagatagtaagagaaaaattagtatattaatctagaatctgaataaagagctgcagaaaaatatatctctacatactcagtttaaaggaaatgaggtctggggaggacttactatcgtttagtttaaaggagatgaggtctggggaggacttactatcgtttagtttaaaggaaatgaggtctggggaggatttactatcgtttagctaagtgtaccaaagcttctggagtttttccttaggatccaccagccatcgtctcagagatagatcatcacagtgcattaaatgctcactgctgtaccgcaaggggccttcgcctgtcctgtggtgcttccacatcttactcagcactgtatcactgaacatacaatgcaggctgtagaagcaatgtgctatgactgtattgaagagaagaactcccgtcttccttagctttaaaatagtctttctgaagagttactttctgtgcctagcaccaagcagcaaatgcaagagatatcccagctaccagattctgtttaacacatgtgtggctgtggcaagaatcatcagcatttcccattgtgtggttgtttagagagatcttacttcatgctcagccttcccttcctcttgtgaatgtagcactgggaagagcgagctgtctgtacccatgaagaccctgtgctcttgctgaactgctctgctgaaactctgcagtccaagctgaaaggcctccactcccagtttcttgccggaatgcacaccggcctatgccctttgtgttgtccagtcttggtctcctactgctctacctgcccacatgctaggtaggtattatgtctaggcttagctcagtgcttcatagaaaatacaggtcattcggtttttaatgtactttggatcaagatgatgagcgcagtctgttactaaagctttttttgatattctttatgttatttagaagtttgcaaagcatctaaacacagacaaaaaaaaaaaaaaaacagacatctgaacccataattctaaaaataaaaaacacggtcttactatatattcccagttggcctggaattcacagtgtagactcaggtgaccttgaactcatgaaggcctgcctgcctcgtgggattatggtgtgtgctgccataccaagtttgggcctgttcttcttctgagcagacagatctgaaaggctcactcccagttctgttgtctgtgtgtcacacctcctccggacaacacgtgcctcctgtaccacgccaccttacttttttgggctaaagagacaaaactggctggaccagacaggactcactcctggatggggaacttgtacatcctgtcttttctcttttccacatggtactttatgtgaggaccattcaatgtggatttcactttcaattccttctacagtcaaatcgatggtagccttgctccatggtagtgcgagtactatcccaaagagcaagacgaactcttgccgtcattgcttacttctgccgtgtttaatgattctgtatccctggagggaaatctgttgagatacaaagtttgctgcttttcatgtatggggacctgtgctcactggagtagtgtgacttgccttcaagaatgaaagtaataagcaagcagtctttgcagtcaaataactttactcatttagaatacatggaagtgtgtcacagtcccccaaaccaaagacataaaatccaccttccccacacatgtgcataatggcacaagtagtgtagttgtcatgcagttgttcataaactggttatcagatggcattttctgaggttgtccaattaggaaaacttttttctgatgccctgtacttatagaaatacaactatttcccagaagtataattacatcccagcctactgatattgttttctttttgtttgtttgtttgtttgtttgtttgtttttgtttgattggttggttggttggttttttttctttttcaaatacttgaagaaagtttacttttcattgttttaaatgtattatttcattaaaaataactttctgaagttttcctgtttcagaaagacaaggaagaaaaattgccacaactttgaggctaactggcctaggtagtgcgttctagggtaatgctacatagcaagaccctttgtcattacaaaataaaaataaaggacttgctagtggaaatgctgaggcttcagttctttataccagaatatggtcctgatgcaaggcactggcttcctgttgtcatcttgctctcccagcttccctctgtagagcatcactgtcctgtctgccagtgagctaagaggcacagaggtgatttttagagttgaacagatgtcgtgacatgagcagggtgacaccaggactctacttcaccaactgccgtgacactcgagtgactccctctgagtgccttcagtgagtgtgatctgtcctttgacagtcaaatggctacctgtgtggctttgtctctctgtcctctttggcagcgtttggatttctgacttttacaagatccctctgcattgtgcatttgtttgatagataaaggtggagtggaaagcttattctctgtcaggttttcaggaactgacattcactctgatatgagagaatatggtagacacagcagtgagttaaagtatttcagatttgagccttaaagagttcatgtgaatggttcagttcgttaatagaacgtgtgcagagacagttgttctcaggtaggctcctgactagtgtggcttttgaacagcaattggaagacgggcactgtaggactagtaagtttgttccaagcgtggggtggtataaaagaaaatacaggcaagagtgggtgagagacacaaaggattcatttaggagaaaagagtggagggatgggacaggacatgggaagaactgagatcagacatggggatagaagagactgcagccatttgaaatggagaaaagggctgtgattcaaatatcgagagccaaagcagggaggtgaggtgggcgccctgccccccaaaagagaataacggacagttttagtatgcttcactgtttaataagaaaggccgtgggagaacaaagggggaagtgagtaataggagatgatcataagagagcaaactatgaaatggagacaggacggatctgcgcgtgagactgtccttgctccagtaggacacgtggcttccccatttcctaattactcgcacatcattaataaagcacaaaggtaagagaaaaatttaagtccttagtatcagaagtgatacattgtgctgaggagacagctgcatgctgttggaacatgcgctggtttgtacaagagcctgggctaaccgtaaagcagtgcaaaggccaaagcaaaaacaaaactgcaagcaggtatcagcagttcaccaggacgttcaggactggccctggtgctgcaggacagaagctggcgtttctgtggtgttgtgaggtcaagtcaggtgccagcgcacatatttgttctgcaaccgagaggcccgtgcaagttagcaagagagatggtgttctagcttcatctctgtggctgtgataaaagtatcccaaacaaaacaaggcatgggaggaaagcggttggttggctccattgcacaggtccaaatacaagtcccttccagcaaggacgtcaaggcaaggacacaagaatgactcgcaccacatccaagttaagagcagagaggaaagaaaggatgcttgctggctgcttgtgccagctgcctttctttactcatacaggtctgggacgagcctagggaatgctgtagcccacagtgggctgggccagttaacaaacaaggcagtccccacagacatacccatagaccaatcagatctagataattcctcagctgagactgattttcctggtgattctatgtcactatttaaaactttgcacagatggggagagtagggaagcctcgcttcctgggcatcggaactcttagcatagtacctgttacatgttaagtatgtaaatgctaatatagttattttcttgattactttaacactgaatgtctacatattggtagctcatgtgccttatttcacacccagtgccatcgagggcatcctcacttctcaaagggagacaggttttcacggtcgtcacgtgacattctcagtcacatgacagataaccgactataattctcgtgttgtaacaagagatccttaagggtgtctccattagcatggcctatttcaaacccagtttctgttctgctcctgacaaatcccatagtcactgtaagagacagcccagtaacttagccatttaattttatattctaaataagaagtgtaaaacttattagctaggagggggtattcttagcatgtaaaaatggagacatgaatttagatcttttaagatttaaataccattcagaagagatttgtgatgttatcagtgggtggatgagcgtatccttctttggccactaacatctgttcctttttcctgcaatgcctcttccctcagtctcggcatacagtatacgtcttcttcgggtctttgcttggatggcacctcctctgtgaggccatcctcaccatcccatccagatccaggccttctttctggctctgtccatctctctgtggctttgcttttataatttcctggactgtggttgtttcagaagcactctggtaattgtctacaattctgagatctgctctaaacaccagccccatggtagagtacagatttcggcttctctcctgcttcagtaaccaatccttagacatgtgagcttttctttagaattggtttgcttgtaaaatagtttattggatggtctcagtgtgggaggagttgtggctgcagccgaaagcccaggctcagctgtcttccatccaaccctggaggaaggcggcccctccccagcagacagagcagtgtgggcaaataatggcaagaaatggaaaaactctgctgttgtttttcccatggaagaggaagtttccactgctggtcttgtgttgacttggaatggaagggagagtgagtctgctttaacagtgtagctccatgtcctagtcagctctagctgcctaacaaataccacagactgagtgatatgcgtgagacaaatctccccacagggctggcgtcccgcagtgggtgctgtcttagagtgcacgcatgtggccggcctagaaaaaagcactctgttgtgtctgctaaggacactgtattagtgacaattccattgctgtgatagaataccatggccaaggcaacttaaagagccgtcactataacttacagtttcagaagggtagcatacataactgtcttagggttgctgttgctgtgatgaaacaccatggccaaagtaacttggggaggaaagagtttattcggcttatgcctccacatcatgttcatcgaaggaagtcagaacaggaactcaagcagggcaggaacttggttgcaggagctcaacctgctttcttatagaactcgggaccaccagcccagggatggcactgcccacaatgagctgggccctccccaccaatcactaattaagaaaatgccctatagacttgtgtatagcatggtcttattgacacaatttctcaactgaggctccctcttctccagtggctctagcttgtgtcaagttgacataaaactgccagcacaataatgatagtgacagagtggcaaccagggcagagagggaggggctggaagtggcaagagaccttctactgttaagacccaccccctcattccttgaagttcagtaaaattcagcaaaattggttctcctctaaacaagctcgtccatggtgtaattctgtatcctggacatgcgagtgtcctattgtgcagattcttatcataaatcagctggtccggcttatagaactgggggggggggcgcacagccaagttaagacacacttataccatgtaaatgtagtattcaacatcatagctgcggtgctcttggaaaacagtttttgcctcgagttgctcttgtaaaatcatctcagctgggctgcagagatggctcagtggttaagagagcactgactgctcttccagaggtcctaagttcaaatcccagcaaccacgtggtggctcataaccatctgtaatgggatctgatgccctcttctggtgtgtctgaagacagctacagtgtagtcatatacggaaaataaataaatctttaagaaaaaaaatcatcttagcctctactctatccttggcttttctggccagagtcagtctgtctgtctgtctgtctctctctctctctttctttctttctttctttctttctttctttctttctttctttctttcctcccttttttcttttcctcccttcctctctctctctctctctctctctctctctctctccctctccctctccctctccctctccctctccctctctctctcttccttccttccttccttccttccttccttcctgagacagtcaattaaaaataagtacaaacttgattccaagcacttctacagtggtgccgtgcctggtgagctggtcctgagcagccgtggagagcaaggctgtaagctgtttcctccatggctcttgtctctgctcctgactcaggatgggctgggattggaacacataaaccaaataaccccctttttcccccaagttgctttttgttcttgtgtttatcccagcagtaggagagaaactgaaagagcctgctttactgtaggccaccctcccttgcttgctgtaagttgacatttgctgtttactgctcagtaatcgagaaggtgcttccttcaactctgttctctgatttaaatgctttcccacaatcccttcccccagaagtaacagctaatcacctccagattcaaagtgaacatagattttaacttcatgttgaataaaaatggtgcatgattgcgataacaatttatctttcattgagaaacaaatgtttctttctcacaaagatagacttgtatattctagctgaataaatatttacttttagtctgaacagattagattttgtaatcccagacagtttgtgtctgtctaaatagtcttcttatcagactagcaataagctaccagttttccaaaaacagactacttgacaaataattacataaaatattacacaaaatattacataaaagcaacttgggatcaaatattatgtaacctatactattggctgatgaaactctatggtgtagcgcatgatacttgctccactgaaaataaagattaaccctctccaccctagtaataaacaaggaattaaaacagatttacgtttgggatcttttgcccaaagctttcatttttctacaatggtgcattagtactgggagagagtgttgtttgctgttagtgtctctctctttttttttaacctctgtaattattagtttattagtatcatccaggactcatgttcagtattcctcctcaaattacattaacaacgcaaatgtaaagaacccaagtcagaattatataacagcactccatcacaaaagcgcgtgaaattacaagaacgctattttatcttttgtttgtttgtttgttttgtttgtttgtttggttggttggttggttgttgttgattttttttaaaagaacactattttaaaacactggcactttaagagaacgataatctcaaaaaacaacccactaaactgtcaaattgttccctaaactaagcagattaaacatgattaatgaatgagtttgggttttataaagaaaaagcaaatggattggacaaatggtactaatatgcaaagtttatcctcttgtatctgattcataaagggacaaaccacagtataggaaaatataccctttattttaaatgtggcataattttaaaagctggctcaagtaattaaaaatacctttaaacagtcaagtttcctgagcaatccatatctagatagaagggcaaaggcgttacagccagcgttcttgtgatagccttcgctgggactaaggtcaacaaatagtacagcagtcttgtattttaagctcacacttttggggatacattctcaggtcttctttagtaggggaaactacaaaatataactgccattacacagtaatggcggttaaaggagagtcctcgtgtaaggattagaaggtacttttccatcagtccttcaaggacagacgttcagattgcttgatcctaatagtcccacggtgtgacaccgttgatcactccttgctttgccaagtaggttatataatatctcttatccagctatcacgatttaggagattcttcaactatggatgaaaatgttaccctaccacaatggcagggcgtgtggacaaaagcgctcttccagctaactagatgaaagataacacagtaataatctatgcgacccaaaatgggcaaagcaaaagactagcttcctctcgagaagaaaactttcagacctatgaaaaggacaacaatactaataaaaaaaaaattatatttacttagaagcattcagaatgtcaacaaaacagccgcaatttttttttcaattacagagtggtattcagttaacagaacaacaattatcttcgtataagctgcatcagagacaactgaagatgaaaaaaataaaaccaaaagggaaaaaacaaaaaactactgtccccatatataactaatttgtgctgtgtaccaacaagaacctgctttaaatttccataccaatttacaacccccagactgtaccaggcaaggttagtggctattgaaaataccaccaggacagggctatctaaagactcatttggtagtgtgttaactatacaaaaaaagacactgtacagtttaaaaacaaatcttacacagccttacatttcaatttttttctttaaaaggagtgagttgtgtacaggggggttaaatgctttatagacaagaaaaaaaacttcgctagaaccaacttattcatcatcatcttcttcatcttcgtttcctcttcctcatcctcttcatcctcctcatcatcttcctcttccttctttttcttgctcttttcaaccttgaccacccccttttttgctgcatcaggttttcctttagctctgtaggcagcaatatccttctcgtacttctccttcagcttgacagccttcttctcatagggctgcttgtctttcgctgcagtgttgatccacatctctcctagtttctttgcaacatcaccaatggataagccaggctgctcgcctttgattttggggcggtactcagaacagaacaagaaggccgaaggaggcctcttgggtgcattggggtccttgaacttctttttggtctcccctttgggcggaatgtaggttttcatttctctttcataacgagccttgccagcctttgccatatcttcaaatttccccttttctttagcagacatggtcttccacctttctgagcacttcttggagaactctgagaagttgacagaagcatccgggtgctacttcttgtgctcctcccggcaagtttgcacaaagaatgcatatgaggacattttgcctctcggcttcttaggatctcctttgcccatgtttagttgattttcctctgcgaggcacagagtcgccctgtgtccgtccggctcacgcttgccctggcgctgtctctatggagctcaatgtactgcaatggctctgttagcatctctcttgatggagagtgaatgtagtaagatgtcccttatctttcctctgaaacagggacagaaatgtgtacattgtagataaaattgtatgtgtgtgcagtacacacatgccatggcacatgtatagaaatctgaagataacatgtgagatgagagtcagtttgcttggtccttctaccatgtggattctgaggatcaaactcataaagctttggtggggatgcctctccccctgagccctgcgatactcttgatggggagttcatgaagtcccagctcttcactggtcattgtttggatggccaccttatcacctgcttttccttctcctcctagttgccttcattactgacaagaacagcaaaatgaccacattctcctacctgacttgaagacattatagggtgaccatggagccaagacaaaaactgtgatatggcttttaattaaatacttgaagcgtattaggagaagtgtaaagtgtttgctatgctgggaaatctccacttgcctccttaaactgggcaccgtccactgttggtctcattcccttgtcagtcataactaggacaggaaacagtccatctggcagatagcatgcttcaggtttttagataacaggtaatacagctcatgcactgtgttgggagtcggggtcaggtgttccatctccgagaatgttgttagtttcatttcattatgtcatctgtccgttcctcagacatgaagcaggagctgctttacacatttaagactgcaaacagagcaaactagtttctttcagtgtgttctaatgagattgcatagcaaatctgccatggctgggatcagccatagctacagagccagcagagggagcccagtacatgggtttatctctgagtcttgaagaagacagagagagagacagagagggctcaacactaagttcacttcttaaaacaggcagttgttttcctgtctacagcataaggtcagcgatgactttgtcttaaggtaaagacatttcttacatctattgatagaagcctatctttataattattgggatttatggtaatgagctgtattttaatctggttttgttttggttggttggttggatttttgtttgttttgatttgaattttatttatttttgtttgctcatttgtttgttttttgagacaagatatctctgtacagacctggctgtcctggaactcattctgtaaactagagtgatccagcctctgcctcgggattaaaggcatgtgcccccccaccacccagctgatcttcattttcttgcatggctcactaattgctaagtgcattttatcaaagactcggagacgtattcagtgtgttgttgccaatgaacgctgctgtttgagtacacaggtgttaaagggcgttttaagtgagagttgtggagaacaaaagtatgctttgctaaagtactaccgtagcggtgttttgaaggcattctgaatagaggcttgctattgcaggctttgagggataatgaggacaaggtctcacactagtgaggttgtttatgggaaacgttaattctgaatttgttctgactccattctccctttgccttccagtcttcccatccccacacattcccatcctgtctttccctctggatttttattttttagaaagttttactgaagacagtacgatgtgagttggaaattgaatgaaactgaacttccaagacttttagttaaggccagaaactgagatgtatagtttcattcaggctttggtggtattttcaggcacggagatcttacttggtggtttgtgtttggtttgcaggctatgggaaagggtctgcttctctatttcacagtgagtcacagccagggtgggtttcctgtgaacttactgtgaatagactcggtttgtgttctcagtgaaaagtatttctaaactttaactcacaggatattttacacatgaatacagtcagaagattttttttttttaagggaaacaaggaccaggaataactagcactgtggccattggtacaagagacattgcagagtaactgaggcaggaggaaaggaaagactgggcatatgtgcccttgaacatctgttcactgaagcaagtatatgtgtgcagagcaagcagaaattacaaactaattacatgcagggtcaaaggaagtcgatataaatatacaagtctttacagatcggagactttttaaaaatagtaatacagctagcagaaattggaaaagaagggatttaggaggccagcaagctaactcagtgagaaaaagccctcgtctagcaagccggcgacctgctccccggagcccaggaagagagaacggaaccagtcccacgagactgtcctctgaccgtcacacatgcacagcggcagatatgtactgtttatatacattatgtgagcaaaccacacacactaattaccaagttttaaactgagaaagaaaagaatttacaagttcaaacctctagttccaaataaaacttccttttcctgtgactctcacaaaggctagtcaagtgccaagcaaagaaatcccagagttctggttaggattcaaaacatctaaatcgtgccttcctgtaagttctgtacctggcataggtgccagtctccgtgctgttccctgctctctctgtgactgccctgggagctcccacagagtgagcactttaggtagcggctccctgaggaaatgtcttcaccttcggacctgcctgagttaccctcagctgccactccgcccatcccaggcatgctgcgaggtaatccctcttctcaggtggattttctcattagctgttatttcagatccaatcactgccatgagttagtgagctgtactataggagctttttgaaaaactggatcggtatgtgacctgctgcctataatggtttctccagatattaagaaaatgtgacagaaaaaaaaaagacaacttaaatcctataacatcagatagtctatttctgttctttgcaagatatatgtttctgatagaggaggggaagtactgtaatgatcagatatctatgctaactgtgcaccatttaaagtcttccaatacagttaagtttatatgaagtagatatatctttcaagtatgtgctacccaagaagtaggtagagatgtaagttagagttgggagtaaagatcatccttgagtttagttattcttgctaaatagcacgtcagcaaatttaatcaaaattaggaaaatttgcctttaaaagtcttttcacattacatctacttaaatatttttctcaccaagttactttaaaattaaaaaccttgaaagaaatgcacaggagtgccttcatgagagacagcaatcactgtcaaagtcactctcagttttggtaatatagttagtggatcatgtattgacagatcttgaatttttacctatttttctcaacaaactttaccagtaataattacagtaattatataacattattttaaaaattattagtcatcattctgctttgcttctgacttgtctatttgagttttagttacctgtagcttggggaaattgaattccagagagagaatttcagcatttcaaaacaaacattgtttagttatatacttgggctgaccatgtcgtgtggttagtgacgtgtgcttggtgtgtcttagcttggttgtgtgttttagagtggagtccatactgagtgctgtaactgccatgggaagtttttgctagaggtgtgtggatagcagtgggactgagttctgcagttgtacttcagggtgtgctgttgggtggggacatcacgtaatgggtattagatatgatgtcattctttgatgagagtttgatgagttactgggtcttccttgtggtgttgactgtggaatggtatattccatcccaatgggtcagatctggtcatggctgtgatgggcacatctgtcgtccatgccctgtgcagaaggaagcacacttggcgagtttctgagtcacctcctaggagcactgagcctttgcagattgttttctgacccccgtgccttcattttaacaactcgtcttagaaattaatttaaaggtgttcgttttctatgtcaccagtttatggtcacgaagacggaaatgagtaggtgggcaacgtactttgtctagcagcccctgtctataccatgtcactgttcttagcaaagatggttgctttattagatatcactttacctcaactgaaaagtgaaataagattttattcttaaggcaggaataccgttgaagtttctctcactggagtatgaaagctagaagaggaccagtcagcaaaagttgtgtggtcacagccaacgtgaagggctcggcactcacaacacgggcatgtctgtgttgcacgtacaaggtctgtggtagcttctaactaggctgtgagcagccttctaaccaaggccacacagatggagagagcaaagcttaggacaagctcctccccctgaatgccacgcccataagaggcaagggccgtcaagagaatgtttccacctccacagacttggttgtgatttctgtcttattaaagatgtttcagtccttccctccttcccacatttactgcagtcatccagcatgcacacacacacactttctctctctctctctctctctctctctctctccccctcagccctctctcttacttttggtctcatctgactgtctttgcaaaccgtgtcagaaccgtgtcttgtcagctttcctggaatgggcaggaaggctttcctgagaagtagcagcagatgctcctggacacagaagagttcttattcctgaacagacggtgttggagcgcagagcagccgctcggacactgcgtgccccagccacttagtgctgggcctgtcatcctccctggaccagccccatagaacagggtgctcactttcttaaacagttcatatagagcagctttacctcagcgctgtgctgaaataaacactgctggtgcctgtgctctacttttagttatttacgtgtgtctgtctgtctgtctgtctgtctgcaggttaatctcagtagctagccttagtgacagttacctgtacccagtgagccatcttgctgtctgggcatcctatttttgaaaacgtaaaacacaacatatgttatgttttatgttttcataagacaaagagttatgcttggtatctcacatcccgttctccttcctaaacacatagagacagattttttcccccctgaaaaaggagtccaggctgctctaagcttgctttgcattttgtgggtattctgtgggagatacgctgggaagaagtgagggtacttcagtgaaatgtgataaggttaggcttggtgtggagtgcatataatcccagcacttgggaggcagaggcaggaggactgctgtaagtttgaggccagcaaagctaagtagtgagacctagtctcataaaacaaaagcccaattgcctttttgctgcccagttttagtttctggtagttctgagattgtggccctgtgctatgaagtggaagttttatttgttttgacttcttcttcttctttttttttttttttaatttgactctttgtggaaattggtgctttctgtcctgaggactttccataaaatagttatttaataatgtccatttttctgttcatgaacacaaaattcttatgttagttagcttgtgtggaccagttcttaggtgttgtttttctgctgcattttctatgtctttagctttttgttgttgttctcaaatttatttctaaccttactattaaactcatcatttctgatactatctttccagctcctaagagttcagtttcgctcttaggtgttgtctgtatgccacctccttacaggcaagtccctcaccgggtgagtaaacgccacagcatttctttcctgtcgggtcagtggtgctctttgggaatcattggcaatgagtttctattgtagacagtagcctgaaagaaccggttggaagtttggtacccttggggcgctgactggctgatgcatcttagggtagcctggctgggctctctgagatcagttctgtagatccattcatcttaatgctgttcagtttccctgatcctaggcggatggtggggttctctgagtccttgaggcagagatcttttcaagtggctcgtgcacacgtacatatgcacacaccagtctctctggtccactgcttgttaaagagtaacaagcatctctttgcttctgccaaatacaggaaggccaggtgtgggcatggaagatctgatggatgtttaacataggaatgttcagtcaggcttgtgtatgggacctgcgcctcccagtcctaattgcctgagttctagagtatacaatcatccacttctcttaatgtccacctattccttgtctccgacttttctcatctgttgccatgatgttaaattcaggtggtatatttacaattcccacatgtatatacctgccttaaacccagactaatcagctgtctccttgaactctctgcttgcctaacaggtgggcatctcaaatatggcatacccacaggggatgtggtcttcttgaagcttctacccaaccaccttcctcgccttgctttttccagaatactctctaaacttacagtctaagagtgaatcattcaggagagagagcagaagtggagtcaccgtaatcataaaaggcttctcctggtaggagacacagttgccatcaacccagatcttagcacattcccgaggtgtacattccatgggctctgttggtagccatgacgattacttcacccactgtggaagtcagtgtggaagtgcctgaaaaacacatagaactgccaggttctcatccggctgcattacacctgagcatataaccaaaggagtgagcagtcagcacactataggcatgcctgcacacctgggtattacaggaccgtccagagtggccaagtgatcggcctaagtatccaccgacaaaggcatggagcgtgtctgcacacaacacaactgctttttcatccctccgggtcccttcccaaaagccttgccagcatttatttctctttctgatgacagtcatgctggttgggctggggtagaatatcagtaccatttgggtttgcattgctctgatggctaagggtgctgaccagttcatgtcacttgcaagaaagcagatgcacttggagatctgaatgttaaaacaaaccagatgcagactctagatttgaaagagagaaaggcatgaaaatggaatgggactatttgggaaaagtaaggaggggccatgaagggctgtgtgaggtgggaggcgtgtgccttgatgagagccatcttcattcctagatactcttttaaaaagaaatctgttttcacatcgattcagtatcctcttagccagtgtactatcaagagaaagaaattttaaaattcaaactatgaattttaaatgtgaacctgtttttttaattctattaagtcctttgctcttggcattggcgtgttttaaaaattctaatgaggggctggaatgatggctcagagctgagaaaccctggctgcccctcacagaagacgcaggtgtcactcccaggacccacacggtagctcacaagtggctgtaactccagttctggattcatgactctacatggacaggtgtgcttgacacacagacaggcaagccactcataagcataaaataaaaataagcgtttttaaaagtctatggaatctacaaaaagtgtatactacaggttcaatgtgggggtgaggaggtgttagtgtaaactattgttaaacagcaaacctaagcagagtgatcatctgtctcttggaaattgagagctttggtcacagttcatgaccctgaagtcatgaacacatgtagtatggtgttaatcagagtttattcattgtttaccagtaccagcgattgatgataagatttccatgcatataacaaagaagccaaaataatccaaagtcttttttttttttttttttttttgacaaagaaagcagaacttggaggactcccctgcctgcttgcaggtttactgtagagccagagtcaggacagtgtggtgttagtgtacagggggcttccagagcagtgggctggagctcagggataggctggcgcatatgtagccaatgcatttcagccagggccagaaggtagttcttggggaagtgatagtctttcagtgctgaagcaattaactgtctctattctcctaccctgcagaacagacagactttgactcttgcttcagagtacacccagcagtgcaaatacatcatagacctaaacacaagagtagaaatgcaaagcttacaggagaagccaaaggagaaaagctttgggggcgggggtttacagtttgtttgtttgtttgtttgtttaaagacaagacataaaaagtacaaaccattctttttagagtttagcaaattcatcatacttaatcaaattttaaaattaagatagttgtggtagtgtattccaatgtttgggagcagaggcaggcaggtctctcagagtaccatgtcagcctgatctacagagttccaggatagccagagttatgtaatgagaccctaactcgaggggaaaaaattcttataaagatatatgcatgtgtgtgtgtgtgtgtataatgtgcgtgtacatatatgtgtgtgtatatatatttatatttatatactatgtatctgataaagggcttatacccagagcacatagagaaacaaacctcttacaacttaaaaagaaaagcagctcagtttttatgggcagaaggttgtatagccgactacagggaaggtgctcttcagcgcccagaataccaaaactaaggagactgaataccaaatgtcatgaaggaattggtggctcagcagagttagaaagggccaggcagtccagcgacccctgcaggactctactcaagagacagggcaatacgtattctgcaaaagaagaatagccagtctgttagtctatgtctttttttgttgttaaagttggcattctgttcttgtggctgtcttctacctggagggcatcatcctgagtgaggtaacacattcacaaaggaactcacacaatatttactcactgataagtggatattagccccaaacctaggataccctatatataagatacaatttgctaaacacatgaaactcaagaagaatgaagactgaaatgtggacactatgcccctccttagaagtgggaacaaaacacccatggaaggagttacagagacaaagtttggagctgagatgaaaggatggaccatgtagagactgccatatccagggaaccaccccataatcagcatccaaacgctgacaccattgcataccctagcaagattttatcgaaaggacccagatgtagctgtctcttgtgagactatgctggggcctagcaaacacagaagtggatgctcacagtcagctaatggatggatcacagggcccccaatggaggagctagagaaagtacccaaggagctaaagggatatgcaaccctataggtggaacaacattatgaactaaccagtaccccggagctcttgactctagctgcatatgtatcaaaagatggcctagtcggccatcactggaaagagaggcccattggacacgcaaactttatatgccccagtacaggggaacgccagggccaaaaagggggagtgggtgnnnnnnnnnnnnnnnnnnnnnnnnnnnnnnnnnnnnnnnnnnnnnnnnnnnnnnnnnnnnnnnnnnnnnnnnnnnnnnnnnnnnnnnnnnnnnnnnnnnnnnnnnnnnnnnnnnnnnnnnnnnnnnnnnnnnnnnnnnnnnnnnnnnnnnnnnnnnnnnnnnnnnnnnnnnnnnnnnnnnnnnnnnnnnnnnnnnnnnnnnnnnnnnnnnnnnnnnnnnnnnnnnnnnnnnnnnnnnnnnnnnnnnnnnnnnnnnnnnnnnnnnnnnnnnnnnnnnnnnnnnnnnnnnnnnnnnnnnnnnnnnnnnnnnnnnnnnnnnnnnnnnnnnnnnncattggaaatgtaaatgagctaaatacctaataaaaaatggaaaaaatggaaaaaaaaaaaaaaaaagaagaagaagaagaatagctcgaccctggaagcaagtagggagtaggaaacttgaggtctgtccatctaggagactcttgggcattacggcgggatgaattatgagagctcagaccatggacagatttgcaaagcactgtgctgagtgagaaaggcagactcggggccagcatatggtctggtctattcgtgtgagagtctaggagaggcaaaagcagtatccatagttgctagccggaagctgggtacgttgcagaaagagcccagctgtgaaaggccccatggagctttctggagaagtagcactgttatgtctcttgattattctgatgggtaatgtgcatggttatgtttttcaaaatccttgtgttataataataaagctatttgaaagcgaggtaggacataagtgcagatttgagtaccctgtgagcagaagaggaatgtttgtcagaggcagggagggagacatcccttccagaggggtgggaaggctggtgctggagctacgccttagggcatgcatagacctctgccaccctgctcctgcctcttattcccactgtaagtgagaaggccaatgttggtttcttccttagagcaagcccaccgtcttggttgcatttttacccatttgacaccctttcacgtccctgcaatgatgaagtgaagcgggcagctgcctttgcttgcttgtggttttactcttagctgttctcagagctctgtcctgagtgtcattgctcacatagcgttcatgcactgtcatgtgggtgatcacctccacttctgggcttgctcctggtgtaggttgtccccacctctccccacaccaattcccctcactgtcttttgaacactaccatctgtttttttctgcctccagtggtcttcctgagcagcttgcctgaggagctgggggttttgggaggggcatcctggcagaattgttaggcatacagattcaggaaccaacatgcccgtgcttgactcctgactcttactgctcactgctatgtacctagggagacgacttaacctacccttgcttccatgtgtcatccctttaaaaatggagggaggggacatgggtcgcagtcaggcccacctttcccactctgtgatgggtggtgctggtacagggcctgcactgcccctcccacgtctgctgcccttgctaatttctttttcctcccaagtctccctgttcataactattcatcagccagggatctctggaaagccccaattacctgggctcctttctttcagtctctgcgttgtctttgccttccacatggctcctgtcagcttccactccagtctccctcttacgaagttgcatgttcccttagggttggccatttctgcttctgttctcttgtctttcccctccaggggaaaggaatctttctaaggtgacagaggttaatgattccttggtcagtcagtggttttcaggtttccattctgtatcatgggatttcacgacggggacactggccaccataaaggggaaggggacgcataagggaaagctgctgcccactcactaccagacacagttcttcacttccgtctcttactatagtcctgctggcatggacatctctaggtctcagggtgagatccacgctctgtgttcaatcataagaggttgacacacacccagcactttccacggtgggctctgctgcctctgccctattgctggcttctccaccttcactaggatttctttgtttgccatcctgctgcctggcttgcgaggccagctcttagttgttaggttgttaaggcagcagtcagacatccccctttcctgttctcccttgctgctgccctcgctagcttcctctcttgccccatctcaccccatagattttctccagtctcgctctgtaagctgcacggcctctcagtataccttctgtatcctgtttcagcctttcagatctctttatccccattgacttcccagttagccaactgctcacttgaaggctacagccaagcccgatttcctctgcggaatgtacctaaccttccgctgctgcgcccctagagcattctggcagagtgttctctgctttcaaaacttaccccttggacttgacctctttgggcgggaaccacgtctctgagcattgtgcagtagctcctcaactgcctagaacaaagcccagggtattgtgtgtgccatgggcgtcccttcacagtctatcttcagactgtcttcattctggtcgcctctcctgccatctgtgcacctcagctgcagccatttgcaccagcttgggatcttctcagcacacccccgtttggactgaccccgcacagcttttatttacatgctgcctaaccagtgcagtgctgtctcttggcaggggctctggttttctcgggatggtatattccttcttataagacctcttttaagtgtatagtgttccagcccctccacccgaagagcatagtaatcccctctgtacgcatccagtgttaccagaagaatgtgtgtgtgtgtgtgtgtgtgtgcgcgcgcgcacatgcacactcggcatgtgtgatgagagagaagagagacctgtgttttagtcatttccagtttctcaccgaatggccagtttatgatggatattgttatacttaaggaaaagctaatctttctctagctttaaaagggcacctctggtgttaggcccctctgactgcacacgagtcaccgaggatcagcctctgggattccctttgtgatcggcttttccttcgcgtgtagccatcctgcatctcctctgctttacctagcatggagccgaggctgagcccttggcgcgcagagcttaaacagaagttacttttcgcactctgcaatttgcaagtcattctcctataaatttaggtcattttgccttaaaaatgctaaatgaaaaccaaaattagaatgttaaaaaaagcgcacacaagattttgcaagcagtagctctagtgtgggggggagcctgttaaatcataagagaataacaactttgagtgagtgtgaattctgtgtctcattcatgatagaactggaagagacctcacgttatctgttcttgcatgaactttcttaaagctggaaaccataagcacagcttcttggggaagtatgtgtgcttctggactcggtaccctcagccagtagaccttccctcgtgctcaacggaagcaccttctgttgggattgcagctcattcccttgtttggtctcctaacaagggaaacagattgctagtattctcttgtaaagtaaacaaacaaactggcctatcgtttccaaaggaaaccatttcaagtgattttccacagagcgaagaggatgcgaattcggacatgcactggtttgtaagctgagagagcagccctgcattcctgagctgcaacttcaacaagaaagcatgctttcttcctcttgacccctcctcttgcaccaagctcctctaaggcctctccattgttgttccctttaggggtgtcaagtttatgcctctgagctgtgccatgcttgttgtgtgctagaattgactgtcacacttcttttagtctcaataaccccgggctgggaagatgggtcagtcagtggtgtggttgccttgcaagagcaggaaccacattaaagagccaagaatgttagttaaaatttaaggctgggagtgcagtcctgtggtagaatgattacctagcatgcataagtctctggttttaatgccaagtactcagaccatagagaagaacataggagagggaaatctaaaagtgaaaagcagtttaagactagcttagtagtggaacatgtgtccagtctatgtggacctttaggtcaatccccagtgttgccaaaaacaaaaatgaaaaaggatagacaaaaaaagtccttgctgagacgaaaggatggacagagactgccatacccggggatccatcccataatcagcctccaaacgctgacaccattgcatacactagcaagattttgctgaaaggactcagatatagctgtctcttgtgagactatgctggggcctagcaaacacataagtggatgctcacagtcagctattggatggatcacagggcccccaatggaggagctagagaaattacccaaggatctaaagagatctgcaaccctgtaggtggaacaacaatatgaactaaccagtaccccctggagctcgtgtctctagctgcatatgtatcagaagagggcctagtcggccatcactggaaagagaggcccattggtcttgcaaactttatatgactcagtacaggggaacgccggggccaagaaatgggagtgggtggataggggagtgggggggggggctatgggggacttttgggatagctttggaaatgtaaatgaagaaaatacctaataaatttttttaaaaagtcctcatctataaagaatgtttattggtctcagcttcttgagttatcccgctttatccatctgaaataataagggcctttccaaaattgatattcaaatcaacattctatttataagatcatcactaaggaataataaaaccatagttttagcatttaaaaaatactacagatcatcccttgagttgagatggaaagtctatagaaccagaatgcctttgtcctaagcgttcctctaacccgagagtgtgtgttcacaggcgacagtaggtttactgttagggcataggactacacacatttactactagagcatatatgtgtacgcataaaattctctctgtggtcctagtgctagacatacacattttgaatcatgtcttcttaatgaattgactttcactgctacaaaatctttctcttcatctctaatagtaatgctcttctcattcagtcttctctgtctgtagctaagatggccacccaactttcttagttataaactcctatctgtttttagatttgtaagtgtttcttttaaatagctcatagttgggtcttgacatttatctagtcctaaaaaaaaaaaaaagtaaagaagagaagagaacaggaaaaaaaagcactgtcatttgattggagcatttaacacatttatgtttaattttaatcacctttattctttgaaaatctttcacatatctttattaagatagatgcctcttaggtcatagaatccctattctgaacttttcctaactgaccattcaagacctcacctgccacctggaacagggatttttctctgccggcccactggatcatctgtagttctcactctactatacgtttcacttatataaatctgttcactgtgtagcccctccacagttctctgtacgtgttatggctcttgctctcacgggtacagctcagtgcttgtccaggcactcagatttctagacctttcttgcagtttcttccctctcacgtagaactcttcacgttcaggtgatggctttcccaaattctcatctgtcttcccagtgggtcagtgtgccctgcttcttctgtcctacttttctgaactgtagtctaggttagaccattccttagagagaacctcgccattgctgactgttcatgtttgtctcactttaggaatcctaatcttatatttcataagtctcttctatgttttacttgattactacagggaagttcatctgttaccaattagcctgtcatgaccagaagttagttgtgtgtgtgtgtgtgtgtgtgtgtgtgtgtgtgtgtgtgtgtgtgaatatatccttaaaatcacccttgctccaaattaattagttaattaattaaaaataaaatcacctttcttgagaaatgtcttcttgcatacctgtggtcctgtaacactggagaactaggctgggcaacacacttccttgaagagtaggcagcgaagggccacctacctaagcatccagaggggcttacaccaagtctgtcatctgctagtccacttcctgtcctagattttctcctctctgttgttttttcactgtactgatcttttgagaatttttcccgtgtttaagatctaactttagcctgggaagctttccagtgagacccttcttatttaaccaccccacccccgcccccacccaccccccggtactcgattttgctctgtacattaatgctattgatctactgttgacataggcatgaaaggattatcaatatgctttgggcagtgcttggtcactgactagccggttgcttttgcaacagcctccttaataaatctgctttgctcctgacattgctgtcacagagatttcagaatcattactgtgctatgagactgttagtccttgttaggcctagaggaggagggctgggtttcttggtgtaattggcttttccttatgtttttcagtttgttttctttgctgtctaaaaaacacaacaaggtcctggagcaagccacgcagtccttgagaggtcccctgagctccagcgatgtccctctcccagattatgtgagtagctgccctgtcctggtcaccaggtcctctgtgctgttagatccttgagtcactgaactttgccaagtctgtccatgtctaagcacccctagacatcttcagggaaggagctgaagaagatgaacctcaagtggtggttattgatagtcaggaatcctagtagttgaaccaaacaaacaaaaacacctcccaaaccaatgacactcaacagaaaagccgtccaaggctgtgtaaagagtgcctgccttgcaaggtgctagtgggggcttgagctgggtccatctgcacccgcttcatccttagccagtattactgaatcgtgcattagtgctgtgtagttatttattccacaaaatgtgttgaattcatggagttttaaagtcctcctaatagtttcttccattaatcagagtacaacattggcgtttctaagaggaagtggtcatatttaatgccaatcatgagtatgactgtaatggtagaacccattttgtgatacacgtttgaattctctgttgaacctctcagttcttactgacttagtgggtttcttcatccataaactttgcagcaagtcctgagcccctggtccctaggatcaccagggaacgctcgctatgacctgtccctgcagctctcgacctaacactgagcacatgaggctgcaacccacaccctctctgccagtcttgctgcctttgcccagagctaacagagcaggagtgactggagttgaatcactacctgtgccaaggatccaataggtgatttgagagcacagtagcgggcctgaagtgtggcccagcagggaaagagtctgctgcgcaagcctgaggacctgagttcgatcccccagcacctagtaaaagtggaaggagaaaaggagttccatagaatagtcccctggcctccgtgggcatactgtggtgtgctcatccccacacatgcatcacacacagtaacagtgaagagagcaaacctgttagcaagggaacggggatgctctccttttgtaattcctcagccgtttaactggttgagtatccttggcaagagccacagatttctgtgtcctggactcaccccagacggcttgcccgcagagctgggaaaggaggaggagagggtctccacagctctggaggtccagatgtgtgctttctgcaccagattggagaccatattagcagagttttaataagtgcttaaaaataagcctatgttttccttcttgcactaacacatagaacactcagggtctgcgtagaggtttctcagtttattaagaaaatgtttatactcattacactgtataatttacaagtcagttgagtaacaacgtaaaaagaacatggcaagttacaaaaatattagtgttagtatttaagtccaaccatgtttgtctgaacacctcacgggaaacccttccatcgcattttagataatgaggaaactgccctggctgttgaagggaaaataatacaaaaaatggtgctcttatcctctgcagagtgcaccctgggggcagtggaggtggaggaagggcagctactgctctgtggcttgcatggctggcatgtgagtgtgcacgctcatgcgcatgtgtctctatgtgaggctttcacaatttacctcagtgagtgggttgatagaggagttttggatggctttttaaaacacttcgggacattcagacaacttactcatgtatagcagagcctaaatatagaaagtgatagcaaatacgttgtagttacttttaactataaccatgtttttaaaattattgatactgttagtgtcacagaggtgatttccttggctctgctaatcaccttagcaactgttagaagcgagaaaactctaaattgcactctgggaagaaccacagaaagtgtgctcgctggttttgttctttcagagagctttgaatcttctgtctgccaaatatgtcatctcactcaggaagtaagttagcacaggtagaaaccccagcggtggtccttaggagaaggatccgagccgtccgtggagtggacttcagctcagtgctgagcagcccatgctggaacgatcccttgttctttggagtcttagtaattccgtccagaggctacttgatgggtgacagcataaagaatgagtacttctatattcttatgtctttaatctctcttggttttaagttataccatggtaaataccaatgtgtgtaatctacataaaaacagtactttcagagcatctgattgttgcagtgtataaagatgtctctggagaccaaaatctttgagaaccattgaaaaatgtatctattacacacacacacacacacacacacacactcaattaaatatacagtcctctgcccagacagttgaatgcactttaaagatcagaaattgctaggtggtactggcacacacctttagtcccagcacttggaaggcaaaggcaggtgtatctctatgaattccccgctagcctagtctacgaagtgtgtatggacagccaaaggccacacaaagagaccctgtcttgaaaaaacaaacagagagagaagctaacaaaatggatttggaggttgggggagacaggatttctagcctagttatcactaaactccctgcatcctcctgcttcagtctactgatgtttactgaaaatccaagctgtgctcctgaaacttgttttcctgaagtcctgtttgcctgtcagcactgctccacctggaaccccagatacttcgttctccattaagtacgctgctccacccctcctttggatagcgctaaggaaacatctattgcatttgtttatataacttatatctgctcttaaacatcggtgttttctgaaatacagtaaggggcattctgacttgattcctataccaagaaaaattcagctcgtgtttctctgtgttattctattgtttacatttcttgtgtttgttctttatgcttggctaggaagagactgtactagtcacatacatgtagcagttatcttgataataatggtatatccagaaacgtgggagtgtgtttgtcattttaaagcagttccttttaggattttcacttttgaggcatgctcggggttgccggccatatttgtagtcacagtaaagaaagtagcatggactggaacacggccaagtcttctctctgggaatcacctcggtgtggctaagtgagcagcgcaccctccacatacagaatctcaaagcaccgataaagttgaagtcaatagacagtagacagtggctcttataaacctgtgaccaaacctaacggacgtccaaagagacagccttccttgtggaagtagggagagggtggagcagcctcctctgaagggagctgatacttgacctgggtcctgttgcgtttgatttgatttttgaaaaggacaatatagtcttcacggtatgcattgggtgcagcagtgtccagcttcaacaggtgctcaagaaccccacatccgctgcagtttggttccatgcgcagcaggtaactgagagtgtgccataggcctaaccatagcagccaaacaccatatggtagttcgataaaggtacgtcatcaggagtttggattaagcaaagacttagatatagcaaaagcacaaagaacaaaaacacttggatagtttggacgtcatcacagtttaaaactttgggtggtagaatgcttacctcagagccatgtaacccagctgtgatgggaactccagcacttggaaggtagagggaggcagtaggatccaacgttcagagtcattgtcaggtgattagtgaattgagggccaacctgggctataaaccctgctgccagaaaataaaatgtaaacttcacttttataggactcaaataagacattgagtcagtaaataaaaacagaaagaagcactaaggggacagaggcaggcagatctctaagtttgaggtcagcctggtctatatagtgagttccaggagagctggggccataaagagactatctcaaaaactaaagagtgaaaggataactcacaagctcatgtatccagaatatatgtgcaaagcatacaatttatcagtcaagataggaacatcatactttaaggtcaggcaaagcatgcaggtcaccagtggagatgcaaacagcatctttaagacaggacagacgcaacattttatagcactttatagagttgtgagacacaaaagagtacttgaaggcctcccttggtatgggggagattctgggcctggggtgttagagaatagagctgcctctgtactgacagtgacaggaagcccttctggcaggggaggctaggtgtgcatagggtgcagatctgaccccaggagagccaccattcaccagccccaggtgagcagcaagaccaagagagactcgccctctgtgtggggacacctgagtgttcctctacacctgagacagggctcttctgtacgtctcagttctccttgaccttgcaatgctgacctgatgctcactgcaccctgcagccccagagataagccaagccagagtgaccatggagagcaaaggatgagtcctgtgggcaggctgccggtcattcacctgctatgaatgcagtgggtgatgcagactggcaaaggactcaccagtacccatttccctaccgtacccccagccccactagacaggaaagcaacgttcccagctcccagaactgagctggaagacgggcgacaatacaggatgcacaggagaaagtgttgtttgcctatgcagtcctccacccttctccctcatcatctgctagcgaggtatggcaaaccagtggaagactgcagcaccccagaaggtggcattgctaagaacactgggctccttgttagtctgtgatacaggtagcttttgttgcaattttgggtgggaaatgtatagacatttcttcaaaaggatagaaatagtagaggtcataaaaaatagttaagcatctccagttatttgggaactgtggatcagaatcatagtgggctacctcttcacacctgcaaagacacctagaggcaggcggtgttagcactgagaagaaggcgggctctcatggactgcttgtgggaatgtgaaagaaggggcagtcttttgggaaatgattcagttacataggaggcagcaattctattcctactggacgcaaataaatgaacacatatctccacctcaacacgtgaatcttcatagaaccattccctaaccatcaaaatgaaggaagcctaaatgtctgtcaacctgtaaaggactgaaataaaatgtagtgttagccatcaaggaaaagaaagggagagacgtgttcctcaatacagaagaacctagaaaacattgtgttaagtaaaagaagccagaaacagggtcacagactgcacggtccctttcattcaagtgtccagaacagacagggcctggcaaagcagacagtgagtgtctgggtctagggatgtgaggcagagtgggataggactactggtagaccctgagttggcaagcgttgcagattctgaaaatgctttcagatgcaattgagatggatgcatatgtttgtgaatacagcaaaagaattggtgatgtagtgtgttagaccttgaggaagccattttaacagtttttctgaaattataattacatcacttcctaccttttttcttttctttgacccccactacatactgttactctctttcaaattcatgacctctcttttttcctttgttattgttacgtgtgtgttcctaaatacataaaaggcagccttctcagttgtgtaatgttcttgtaggtatgttttcagggctgaccagagaagactgtctgtctgctctcagcattcctccgttgcctcagttgcttggtaggcttgaggcatcatgcgctcatcttccacatgagcatgcccactggtatcttccttgttgcagtcatatttaggcagtcatgctggtgaggcatcataggtgtagattctctggttattttaggagaaacagtctcacagcaaagaccctgtgcttctgactcagcagtcgctaagccttgggtctgggagttgtgctgtagttatatcagttgagactgggctccaaagctctgtattgtgctgctgtggtgttctgtaatgttctccatctgttgcaaatcagagtttccttgatgagggccgaggactgacttactgtgagtctaatatatagaatgtatgtagtgcggtggcagtgataggttctcctccaagacgtcatcagccctggctaggtgtccagtaccaggtatgttttctctcttgctgagtaggtgaaatcatttttaagagtagcctttggaggatcggaaccaaagaatcaaagacttacaaggaagtagaaagtgtttttgtgagcagcagcttgactgtagaaagtgttagtgagctagctgcacaggtacacgaaggtgtatgtgcttctcagcactggtgtagagcaaaaggaaaccagcaaaatacacatcgccaaagcactgggcgggatcagtgaggtgaggtggctcagcggggaagggtgcctgctgccagtgctacagtgccactcgaacgccatccccgaactgcatggcgggacaaccacagattgtcctctgacctccgtgtgtgcaccacctcctgcccccatcataaaaagaaaaggggggaaaaatcactcaatcagagcataactaatgtattgcattcttctgtggctttttaaagagtttaatctttatagagacttatgtgagaaataatcttcataatataaatcctttttaactttagattggcctacacacagatgtttaacaatacacttttcaaattaaaatgattagcatggggaagtcagatggaggagagagggttgtgtttttcttcatagacgaggtcttgggacattcggcacaggtgactggcgcttgctgcttcccttcctccttttcaagacgtctcccagagacttggctcaaagggggttggtgatggtggtagtgatggtggtggtggtggtgatggtggtggtggtggtggtggtggtgattttcctctggtttttttgttttgttttttttaagaatttcttatatttcagcttccccttggtgaacatgttagatttctcagaactaaaaagtgactaaaacacacattataaccttgagccttcgtcctttccctgggtcccactgaattgttcaccatgcctccatgatgtctccactgtatttcttgtccttctgtgcttggtgctgctaaactgccagtgagctttgtggagacggtccctcggcctgcatgtggtgttttcttgtgcttgtgctaatgctggcccttcttggccaaaatgttgtccagccgtgtgcgggagggtgcagtgccatgtgggagggtgcagtgccctgtgggagggggcagtgccgtgtgggagggtgcagtgccctgtgggagggggcagtgccgtgtggaagggtgcagtgctgtgtgggagggggcagtgccgtgtgggagggtgcagtgctgtgtgggagggtgcagtgccagctcacactgccgctgaggtttacctagaccactctgctaaggcagtgcctgccaagggcttgcattgtaaacttgtttttccctttgtaattactctgtacttgaggagctgcttaaactgtgccaaatccttttctgccagacactgcctatagcacagatcgcagatttgctggtgattatcagtttttctcattccttctacattcagaaacaaggaatagtttcatatacactgcaaaatgtttgcagtaataagcaaattagcatatttattactcatgtggctgccgtgggtgtgtctgtggggggtgttgtaggggggtgtgggtgtgtgtgtgtgtgtgtgggtgtgggtgtgggtgtgtgtagggaactgttgagatctcttcacttagcagatctcaagtacacttagaaatattcctaagcaccgtccacatctgcacatgaaatccacagagcccatttgttgtacaacagaccgctcatgcctgcttcagaacatctgctagctacttcctctctgcttctgtgagctgagcttgaagttccatgcagaaggggtcacacagcatttgtctttctcacatagctcatgcccatgctgtttcaaatgacagacactcctttttatgcttagtgacatcgcgttgtggtacacacagcacttgctggtgggccagtcatctgtcaggaggcagttgaatggtttcctgcctcagctcccaggaatcagccacagtgaatatgagggtgctgataactctgaggtaccgatttcatttcctctgggtgtatgctcagaagtgaggctgatggttttaatattgtaatgaagtatttcctttttaaaacttctatattcccataccacctgtggatatacagttgtttttaaatgtcaggcaaaaaaagttatttcctaactaaaaactacgtgacttaaacataagaccagtcctccatatgggtgtcccgttgtggctgggaattgtgagttccggtttctctgaggatgatcctggttctattatttgggaacttgtagttggcaggctcccatcctgtgtgtaagaatcctacaggcaaggtgggcttgtgctgagaggaagggcgtcggcagggagagcggcctttaccagtgcttctgcaggagtatggtagatggctcttttaaggattttaaaagatcatttaaaatacttaaatactttttctgttccttcctgtaggacatgtttgcctggactgcggcaatgattaattaatgttctaagtgaagtttaaagagcacagaaaaatacaacccatgaatattaaagtcagcactaatgggtgatccatttggtttttttaaaaaggaaaaacctgatcagtttcttttttccccttctttccattctatggaagctgttttcttatctacaactgtgtggaactggtatagcaacgcctttcccggtggtgtctccaagcttcccttatttggtcaggaaaccccattttgattttctgtttgcatgcattctgatggcttgtcttccccctttctgcctcagttcgttgttcctaatggggggagggggtcctagcatttggaattttctttgatttacccttgatttacatggcaaatagaaagcagctgtccacttaagcatctcattcttggaaccatagtcccctccagcgtcatctggaaatgatggagcttggaaagcacagctaagaagaaaaggcaatgtttgttttatgtgggatgagtgatttctgttggggtcctttaattcgcctattatgagggttattaaaaagcagtattacaaaagaggcttaaatgaaaagaatttttttgagctggtatcttattattacagttgattatagtcaaagctacaaatgttttagaagtggcactttattttagtttctccaaataagacccaaaaaacccagtaatcttactcattgtatgagtggaaattcaatctttcccttgattgatttaatttctgaaaacaaattgtgtttgagaattcagttctagcatttttttcatggatttctgaaaatttcttacaagaataatccttacaggaatatttgaggatcaccatagagcagaaccctgaaatgcatccatccagtagactcatggcgttctttaaaagtctgcattcccagcaaggccttggcaacttagtgcattcatgacttccttgactcctaagccgtgaatgtagagggttcagtgctgggaactggtttactttaggaagcaggaaagtcattcttgctttgacaggagttagagtcattctgttattggactctgtcaacttttcatgtctgttaatgcagccgctgcttccagatagctactattcaggaattttgtttccagggcttaagtgagggcgcttagcctgtctgtctaactcagtacggcaggcagactcagttacttttgtgcatttgagtaacctgtcgtctctcctggtattttctaagatcttaaattgatgttttgccaaaggacagaaaaagtgtgtggtattcctttggcacacagcgctggtgagcacactgagcgcctggccattcatcctctgtaaggtcgtactgttggctcagggtgtcttaacaaaggataggttgagaaacttcaaccataaacacttccttctcagaatttgaaggctgaggtgcaaggtcagggtgctggcatactgagtttcccgtgtgcttaaggggccttttcctagcacctgcacccagctcacccttgtctgtgctgcccatgggtcctggcagccctgccctccccacctgctcacctcccgatcccctgtcactttatactccgaggtattcctgtgagtttggaaaagagttgaaggacaggctagatttgttggtaatagttgcctccaagtgaaggagtgtattcaaacggacaggagtgaagctggttctcggagtagctcttatcctgtgaggcgactgatgaactatacctgactctgaaacaacttaacaaccaaatgaatccagttggtgagcaaccagacatctaaatggctcagtccctagtaagctgtatcataatgacacaggcaagaggggaccagatgatgtcactggaggcatgtgtacagaagctctggctttgtcatttgaagatgcatgtttgtgtttcgtgagaacaggcaagcagtggagacacgatgtcgtttccccatggtccttggaaccggagcttccaagggaaatgagtatagacggtcggaaaagaaaagcaatgatggagaaccctttgatcttgaatagaggtgatctgtgtggggcttgtctcttcatatcttttgctggtctggccattttacttctagtctttgaactcataaaagcagtgaccaacccaaccaactagctttgatcacctcagcagtggctcttccactggaagcccagccagtccgcccctcagtactgcaggtaacagaatggatgaagggaaactcccttgtggagaggccttagagctaataaccagcagtgactttgtggctgttggcttccagaaagaagctgctttagatctcattcatcccggctaggacacacccacctatgaagtgcttttaccgaaatcaaaacaaagacaaacaaaaaccctgtctatttgagcctgctaccaatttaaatatcaaaaaggacctattgcatagaacttgcaggtgatgatagagttatcctccttcctccctggaaacagggcagtggattctgcttctaacaagattgctttaaagctggtcttgaaatagagaacaggagcgtggtgaccactctggtgtccgttcttttgcttttgtttcatttgtttttctgatgtggtttggattttgtttttgtgtttggagacaaggtcttactgtgtagcaccggctcttctggaacccacagcagtctttctgtttcattattacatactccattcttttatattacattgagaacggtataaaaaaattgcatttacattttcacaaaggggaactacaaagataaataatggactgtagaaaaatctatattctctgtatgtgaataatgatacaaatctgttccccaactcccaagaggggaaaaaatttttaattctcattttataaatcactaattaatcacattgtatgtccaagttttgggttccaccctacaagagtggactgtgagttttcatccttttaaagctggatagagaactgagtatatgaaggaactggggcgatcccaagcttcaggtatagacagtgtcaggtaggcatattgtgctggctagttttatgtcagcttgacacaagctgtagtcattttggaaacggaaacctcagctgaaaaactgttctcactagcctggcaatgggcaagcctgtgggatattttcttgcttgacaattgtgagaaggcccagctcactatgggcagtgccgccctgggctggtgctataagaaatcaggatggacaggcagtgagcagcaattttccatggcctctgcattagttcctgcctccaggttcctgccctgacttccctcatgatggagtataacctcagagctgaagatgaaacagatcctcctaaccacgttgatttgggttgtggtttatcacagcaaaaggaacctaacaaggacagcgtatctcaaagaatcagttgtgagttgaacattgaggatgaggatgaagaggtgtccgttgcgtttaggcaagcaggtggcacttgacgcttgagagtgtttggtgtccatgctaaatgaatgctgtagtcactgtaaggagtagattattttagttgaagtctaagaagtagggaccagcatgagttttctcctctctcttctatttagcctttcgtactctgtatttctgttgttgctgttgttgctgttgctgctgctgctgttggtttgccttgctctatgaagttcttatctgggcattaattatagtaggtgagcttgtctaaaatagcaagggaaatggctaagctgaagagctcaccacacaccgcacaggacatgagttcaaaccttcagaacctgaatgacagtcaggacacagtgtctcgaaattttaatgccagtgttgaagatgtagagaaagaaggattcctgggacttggtggccagctcagctagccaattcagtgagttccaggttcaggtgagaggtcctgtctcaaaaaactaatgtgcaggttcaaagaaaatactcctaaaatgcgagtataagtgtgcttgacaaatgtttgtcattttcctatcaaaatggagacaaggaagagacttgagccccaagcaccagagaaggaagtgtgtgctgtctaacaaagggtgacagtgccatgtgcacgtgcgcgtgtaccaactcagaaagcttacactgtttttttttttttttatctcctgcttttatcccagtgtccttactgctatattacttctgtagagccttctgtccaatgagttcaaagcacttaccgtcatcaagtcatttatttcttggatttattgaatgggcacccattgttcaaaagcctgtgggcgtaagtacaaagttataaaagcacacaaattaaatgtaatggcacaggaataagagagaaaagcctgcaggattgccgctttgcctgttaggaatgctgtactcttatttaaaaaaaaaaaaaagagtaagaaaggaaaagaaccaacaacctggacttcatcctgtcctgagagctacaaaagaatctgtcagaggactgaccatgctgtgctgctcagagaagcctcattgaactttggaagcattctggaatatactgctcctctcccagacctagttttttgctctagaagcaatgcataagaaattcttgttccctccctctgtctgctgcacacattcagacaaaaaggaattggttgaccaccattgtctcagcaacatcataaaatgtgaggtgtagttttagtctcaggggcccagctaagtcttgggttcattttcaactttttaacatatagcagaagagcttagttgcacattgttgtggttataaaaagataaaggggtataaaaatatgttctatgggggtgtggtgaggtgtgggggaagggggtatctcagcgggcccatgccaaggcatcccttccccctgagggaccagccacatgatggtatagtatagaacagggtttatttagggcatggggaggggagttaagagagtagtagaggcaaagacaaaggcagagagagagagagagagagtagagaagtagaggccggccatggtcatatagaatggagggagcaagaggcaagaataagagagtgaggaggggtcaagcagccccttgtatagtgtgccaggcctacctggattttgccagataactgggggggtgggggagggggagtccagacagaataccaaaacacgtgcttggccttgatctggtgctgaggatgggagctagcacggaatttaaaactgaactcattaattgcattgataaaatttttccttaagtttaaaggaaagaaatatgagcatctagccgtagaccctcataaagtagtaaatgtttggaatccctttcaaacttcactttacacataatggcagagtcctggccacaggaaggagcttgccctcacccgagaaggcacactttggtgttggtaatctggggagagattggcacagacttctgataagcatacgttccaaccctaggtgctttcttctagaatgtccttcagctggagggctctgatgacatgtggctaatgaggtattacagccgaaactgggacagttctgtgttcctcatgcaggcctttccacgcctctctcttcccttctctctgcctttatattatgtcccataattcacagctctccccacaggacccatgagccagctccacctttccataaggtcattcccatcccatacctgttaagtgggtggcctgtgtcatccgggaaaggcatggtggctctttggttggcgttggcagaagcgaataaaccacatcacttagcctggtgacctggaatccctcatcgtcagcccaggtgacagagctttgtcaaggccagatcacagaaaagcacagaatgctgggtgagcatttgttcagttccacattgtcaaagctcttacaggaggctacagggcactttctgctggccgctggcttgagagattctgtcaatgcaggcgctacctgctgcacatgtatctagtgtactgtggagttctccctctgtgcttttgtctgccttttggttttcttatgcttttttgctcaacatgtataatttctcatacagtttactcaaattttaacagacttaaaagttcaagccacagagaaggttataatcattctttaatttggcttaacacaccagagttagagatagctgtgacttttggataataaccaacaaattagttcaaataatgtcacaacacatttcttatatatttaaccaaatgtgtaggaaagctctgcttcccagaatgcttgcttagagaggcattgttccttaggagtgctgtggggttactaaaattgggtttttactgccatcaactaactcctaatgtgatgtctcaggaaacccaaagtgatttcaaacctagagccttgcttatgctgggcaaatgttgtaccactggctagttaggactgttttagctgacagtgagccccaagaatgctgggattgcaggcacacatcatcacacccaactcagggggtaaaaggggaagtggaggaggacacccgtgtggtgtgccgtgctgtgcacatggaggtgagagggccacatgctgaatgggccacatgcagtccattgtttcagaatcaagccagagccttgttgccttcccagccctcactagctttgttggtaagaacagatttttctgtaattgttcctatacatatttaggtccttgccaaagttaaatgaatgacagtcattatgaaaaaggctttctgtcaccctgtctcatgtagagcaagaacggttcagtgtgtagggcgtgcatctgagataaggcgtcatcttccatcactaactctgggtctcgaggaaagcatggtctgcctatagctaaataaaaaccctgaagctgcccatttctcctctgcagactcctaggccagccgaccagacaacggtggcacttcctgttacctcaggctcatttctttttcttttttcttttctttttcttagtaaagatgagaaaatcaggctagaaaagcaaaattgtgtttgtttacttgcttatgtttggttttgctgaaataaggtctcactgtgtagtctgaacttacccaaactcaaagttatcttccccctgtctcagtctctttagtatttgaagaacaagcacatactactatgcccatcagagaagtcacatttcattgtcacacatttctgaagccctcaccctcgtggttagtcatcttcaagtcagacagccctgtagctctgcagtagacaggtcctgtgtttctgcttaacaagacagtgggtttccccagaggtgggaggagttgtttacctcagagtgctccgtgcgcccttggcccagcactggtcccatctcatgagagcgtggctgtgaacataccagaggccaagccttgtctgtccccagggcccactctacccatccagccctcaagcataggaagtgtgaggcaggtccaggaagaagacgtttgcttgtcaccttgctcccagccgaagccatgatgtcacagttcagtgagttttagtaataagtgacagaaataaacaaatgtttgagagcgtgacatactgtagagaacatcaccattacattccttcctggtgcggtcgctgtgctttggtgagaaatggcaccaagtaaacccggtgcacgtgtgaaacctaagcttggctccccagcacccacagagaaggctaggcgtggcaacactgcctgtgagattactggaggggcagacactagggtcctggagctcactggccacaagcctagctgagcatgctagctctgggttcttggagagaccctgtgtcagcagaggaagatggacagacagcaggaggggatacccagcattgctctcaggcctgtgtgtgtgtgtgtgtgtgtgtgtgtgtgtgtgtgtgtgtgtgtgtgtgtgtgtgtgtgcgcgcgccgcgcgcgtgcgcacagaagagttgcttataccaaagcattaggccaggggccacatccctctttacaagtgagttattactgtgccattttgtgaagggtggacttcatgttagtcaccacttgtttgcttcctattttaattttaatcttttttttccatttttattaggtatttagctcatttacatttccaatgctatacaattttaatcttttacttattgataatttctaaaaacttcttcctgggaaatagaagcagatctctctctctctctctctctctgtctctctgtcacacacagagagagacaaacagacagacagcagttaacagaagatgggccctcctaactcaggacgtgatgacactgggtgtctctctgaggtgggccctctgaagcctggccttccaaagggagcagatattcagttctactacccccaccctcaattgatttcatagaatacgaacataaagaatgaaaaatttgaatttttaagcatataatcacaagcaacaatagttggaaatggattatgtatgttctttgggtgcctttgaggtttgaaaaatataaacccactcatatttgtaccagggatatcttgacacttgctatggcaaatgttctttgttaatataaagatcctcagactgcttttaaaatcaatttctgccataagaaataaattgcaaatttagcgcagggccacctcctaaagtttttgaatggtaattgctaggcaataggcagttcccatggcaacatcagtgagccttgctctaattgtacatacagactgagtcaccccattgccgttgcccttgactgaagtgtgggtattagtagatatctggacaaaatgcgggcattgtcccattcattaggcaactgtaaccacagcttttgatcatcaaagtgctgaattgtatagcagggtttaagtcaggctgtcttcagttagggtcacctgcatcagttatggtcacagcattatacttagagtatttttaacatatttctaaacaaattaactgcttattgtaacaataatatttactttttttttttttttttttttttttggtttttcgagacagggtttctctgtatagccctggctgtcctggagctcactttgtagaccaggctggcctcgaactcagaaatccgcctgcctctacctatatttacatttttttaagttctcaagttttcagttttaatgtacatttttacttttcgaaaagctcaatatatcttaatattctgctcttaaatgttttctgaattagtatttgtgttcattctgcatttttaagattttattgtgctaattatatgtgaatgtatgtgtgtgttggtgtgtgtgcatgtatgtgttgtgcatattgcatgagaatgtgtattagtgtgtgagtatgtgtatgtgttgggggtgtgtgttggggtgtgtatgtgaatgtgtgtgttgtgtggtgtgtgttgtgtgtgagtgtgtgtgtgtgtgttgttgctccatgtatgcatgtgctagggccggtgatgttagatccctgcagctggagttggagacagttgtgaccacccaaaatgagttgtgggtcagagctcagctcctctggaagagggccgcctctctgaaccccgagtctgtgctcccccccccatgtcagcccgtccgtcccttctcctacctcacatgtttgagaagagaagcattactctgtagtttctgacctctggagctccctctctacacctaacaagatgatcgtgactttctcctctgccgacttactgtggccacacggagactcagccctgagactttttattacagccttggatctgatgtgcatgtgcgaagtggactgttttgatgacactggtcttttacttctgaatgaactttcccagacttcgaagccatacttaatgtttctgatttaagaaagaaggaaacgagggttggtgaagtggctcagcgggttaaggtgcttgtggccgagtctgatacatgagttcgggaagcacatttgtcccctgaaggagagaagtcactcttagacgctgtcctctgattctcgtgctcacgccttggcatgctcgcccatgcccctcccccttttatacattaagtaaatgaagaaatcgcaccaaaaaattgtcccttggtctagagagattgttcagtggttaagagcacaggatgctctttgagaaaacctggcttcagttcccaaaccccacgtgatggctcacagcgtgtcacatcgtgtaactccagttctagaggacccagcaccttcttctggcctccaaagcatacacatgctaagcatctacacattcaggtaaaacctaaaacacccagtcatgtaaacaccagtcagtaaaccattttaaatgcttctgtagtcttgtatgttctctatataaacatttacatttttgctaaagtattttatagtaaattctggaattttatctcttcatactttgatatacatctcccaaaacattgtcattttctttataatcgcacaccattctcgtacctaacaaaagcagtaatgttcccaaggcatcagctcatgtagcacaatcctatttcttctgaattctcagaaatggctggtggcagtgtgttaagttagaattaagattcgcacatatggttgttatgtctcctaagtctttaaattagagcagtccacttcccttttctccccagccgttaacacattgcagaatcccggccacttgcacagcatctcccccactctgagcagggctttggttttgggttggggggtcagttatctcttggtcctttaacttgctctctggtcctgagtcatggaagtgggtatttacactaaaggtttgcacagattcagacagattcggctttcttggcaagagctcttcacaggagtccagcttgcttcccccagcggattggacagttccccttagtcctgtactgtggtggacactagagtggtttccccaaactgcaaactcaccaccttgactgtgattgaatactggaccttaattaggattcaaagagattgtagaggtgatgccctcatccaatagggctggggtacaccaaagtctgcctgactctagctgctcacagaggaaggccttggggccacacagagaaggtgtctgtctccaggctgtgtgtctgtccatctatctcccctgctgcatgtcagtgctttccccttctctcttcagcagtgtgtccatttctgtctgcacttaacagaagaggacattctgctcccgtgctcagagctggacacaggctctgcctttattccgctgtggcctgcttcctttgggtttccctctggtttatgtcatttactgtctaattttactgttttgatatgattttccgtctttgcagggctggagagggttcaactgttaggagtacaccctgcccttgcggaggaccttcacccacacccatgcacatggccacacagagacacacagttaaaaagttgtgggtttttgtttgcttgcttgtttgttttttaaatctttgagcatggtctcactgcagtcctagctggcctggaacttgctgtatagtaaggttgccctcagactcacagtgatctgcctgacaacgtttgtttttggtttggttttgttttttttaagtgactggtttttttgttgttgttgtgttgtttttcattattctctctctctctctctctctctctctctctctctctgtgtgtgtgtgtgtgtgtgtgtacaaaagaacaccacagagcatatgtgtgggtcagaagacaattcttaggaatctgttctcatctgccaccttgtaggatccatgaatcacgctcaggtcacttggggcctgcatgtgacagcctcagtccgagtgccactttccgggctggatctgccttttgaatgcaccttcggttgcagctcttcagccgaagagctattcgtgttttctgggtgatttgcaaggctttctcatctgtcctttactttttatgtatattgctagcatttcccttgtcatcactctttctcccacgtatacagtccctactttgatttcattaagtctctttcattcaaagctggtttgtttttttttcttttaagagttttgagccccacccccacccgacacatacacaactccttcctagctctctatgaagcttatgaaataggtttctctcttttttttcccttttcagttttccttacatttgggttgacttgacggcccagctggccacccttccagaggccccacccggttcagttcccatcaagcctgtggtgcctcacagctgtctgtaaccccagtgccagaggtagaccgccctcctctgcactcctgaggcacaggcacaggtgtggtgcacaaggtgaaagcgctcatacctgtaaataaaattttaaatgggggaaaggacattttaacttcattttacattttaagtctttatattctaggaatcttttgttggaaaaacagattagaaatccatccttcatggtctgtggtggttttgtttttccacttgattacttctcagggccagattcagtgccctttcctctggcaggaaatggagtcttagagattgctaacttttctcacttttctcctgtggtgagtgttcccgaggcctcgcctgcctttctcttctgcctgtctgcccttgagtaactcggcccagcatgttgctatggtggaactgtcagtgagccctgattcctcttctttttctctctctttttttaatgttgtatattaaatgttttcttcttttacatttcaaatgctatcccctttcctagtttcttctcctctgaaaatccccctataccctcccacctcccctgctcccaacccacccactcctgcttcctggccctggcattcccctatactggggcctagaatcttcgcaagaccaagggcctctcctcccattgatggccgactaggccttcctctgctacatatgcagctagagacacgagcactgggggtactggttagttcatattgttgttccttctataaacctgctgacccctccagctccttaggtactttctctagctccttcattggggaccctgtgtttcatttaatagatgactgtgagcatccacttctgtatttgtcagacattggcagagcctcacaggagacagctatatcagggtcctgacagcaaaatcttgttggtatatgcagtagtatctgggtttggtggttgtttatgagatggatcccagggtggggcagtctctgcatggtccttccttccttctcagctccaaactttgtctctgtaactccttacatgggtattttgttccccattctaagaaggaacgaagtatccacactttggtcttccttcttcttgagtttcatgagttttgcaaattgtatcttgggtattctaagtttctgggctaatatccacttatcagtgagtgcatagcatgggtgttcatttctgattgggttacctcactgaggatgatatcctccagatccatacatttgcctaagaatttttataaattcattgttttaaatagttgagtagtactccattgggattgcaagctggtacaaccactctggaaatcagtctggcggttcctcagaaaactggacatagtacttctggaagatccagcaattcctctcctgagcatatacccagaagatgctccaacatgtaataaggacacatgctccactatgttcatagcagccttatttataacagccagaagctggaaagaacccagatgtccctcaacagaggagtggagacagagaatgtggtccatttacacagtggagcactattctgcttcctcctcttgcactgctcacacagctgggctggagtgcagcacccgggacctcatgcagcagcccctatgaggtgttcctctgccgctcctaacaagagccgggctctccatgcagttcattttatctcattgacttacagagtcatccctgataggtcaggaagactccagatgtgcaacttttctggtgttcctgataatagaggaagaaaggcattcttctcctaagcaggaactcaaggccattttctggtttgccatcttccaccacaccccctttaactcacagagcccatctgaaggaactgagcacaagaaagtgatttgcttaagacaactggaagccagccccggatgcccaggctgaccagtgctcccacacacacaccaggtgctgctgtgctcagcatcaccgactctgagggggattgcccggctctcaggcctgtgccggtcattctcacagatatctgtgtttctgtcctcctcagagctaccagtgactagtcaacgttgtgaaggagtcagaagcaaaattttaattgtattcgttcgaggtcactgaagatttttttttatgttaatcatttttttggtagctaataaaatttgcggagtaatttttccactttttatggagactcaacagtgagtattgattttgcagatgactaacctggttgactgagcagaagttgctgagctgaggagggtaacactgtggctctgggctcaccgaataggaagacagacactcagggagtcaaagcttgaagagcaggcggggtgggggtgttcgttgcttggttcattgctttctttgtgggcagggcccatctttccctgagtgttgttttaccaggatttactcaagattttactctttatcgagtgtagaagggtgttttttcacaagaattcaaagctgagtacagactatgaaggtgagcatttacattgtcaggctctggcataggcgctgtcacagctgccagcagaagcccggggaaggtggcctgctctgctctgaatggcacccagggcagagaagccactgcaggcatctgctggagcacagctgccccaggctgagaatagtccccgtgcagccctgcctccagctccctccatcagccgcagagttggtcttctctcagaacattccttcttttgtgaattgtctgtccggtttccagttgtgggaaactgaagttaaccaatgtcccctagtggccacagttatcttacttcagtgccaccagtgccagcactacggtgtgttatagatcacttgtcccagggttctaggcgaggcctgtgggtgacattcagactgtgtccacacaaggggaagaagagtatgggtctcacattcccacccaagagaggcatgccagagctctgcttccaccccacctgcctgccccactcattaaagtcacctattgtctcctttggttccaggatttattcttgggctgtgatctgtgtgtaatataaagccagttctttctatcacaagctggatgttttgggagagatccagttgtggctagaaataacatggtcacaaagcttttcagtgtgtgtgccagtgaattaacaacataaagataacaagtctatcactgagagcttgcctttgaaggccggagccgtgcctctgcatttcctccccctccccgcctttggcaaagtcccattaattttgttgaaggttttattttctgctgaaaatgcaggaaatttagacaactttcttggaatccccccaaaactaatacaaacaagatacatatgcttctcttaaggaaactaaaaataaatgatttgaaactgtataaattccctcttaaaaggaaaaagaagtttttaaaatgagaggcggctctgagtgttgttaactgggtaaaatattcccacaactgccaactgagccatcaatattgaattattacttgacacagagttgttggactctcatccctacatggacagagactgggactgatcaccctgggtccttgtttctacactggaactgtgtgcacatgctcacaggcacatgtgcgcacacacacacacacacttggctcactgacttgctctgggctccattcctgccatgcaaactgtgtatcctgaaaagagcagggtgtggatgaggaaggcacatgggtttgttctgagtactaggttgcgctagccaggagccgtcatgtggcttctggttttgacacagggatttcccctgtagctcagactatcctagctgaaatcttcctgcctctaccctgagtgtttatattatgttaagtttgttttcctgagatatagggtctggaacatggctagcctggaactcattatgcagtatgtaggccaggctggcctggaactcacagagatcctcctgcctcggcctcccaaattctgggattaaaagcatgtgcaagcacacctgactatctttcttagtttcctttcattatttattttaaaattttgttttaaatgtgggtgacagtttgcctgaatgcatgtctgacacccccacaagccagaagcggatggcagatccttagaactgggttataggtgatgtgagcccccatgtggatgctcagaactgaacctagtcctctctgaaagcctcaagtgctcttaaccactgagccatctccggagccctgtgctctcattacactgtaactggctcttcagggaatactgtacagaaaattgatttacattctgtaatacagtaaactttataaaagtaatatcttttaaaaatctaaccagttccttcaattctctcagctgctcttgctagagatgctgtttgctgccgtctgaggtggctgtcgggccagtcaaacatctaaatcccagcactctctggaatttgaggcttgatatacagagacggagttccaggacagccaggaccacacagagaaaccctgttttgggggggggggggaagaaaactaagaaatattatttctgtgttctttggctttttattttttcatttaatagttgtcttagggttttactgctgtgaacagacaccatgaccaagacaactcttataaaatcaacatttaattggggctggcttacaggttcagaggttcagtccagtatcatcaaggtgagaacatgacagcatccaggcaggcatggtgcaggaggagctgagaggtctacatctccatctgaaggctgctaggagaatactggcttccaggcagctaggatgagattcttacagcccacacccacagtgacacacccactggaacagggccacaccttctaatagtgccagtccctagccagagcatatacaaaccaccacagtagtaatagctaaagaagaaaaaaaaaaaaaaaaaaaaaaaaactgtgtcgttgttgtagttgtcattgttgtggttgttgtggttgtgtttgatgttgttgtttacttcaaagtatacaagttcccacttggaaagcagtgtgtgtctcctggaatccccttctgcaccctatgttgcacagtgttaagggctttacaaatgctactcagctgttaaaaacaatgaatttatgaaattcttaggcaaatggatggaactagaaaatatcatcctgagtgaggtaactcagtcacaaaagaacacacatggtatgcactcactgataggtggatattagcccagaagctctgaatacccaaggtacaattcacagaccacatgaagctcaagaagaaggaagaccaaagtgtggatgcttcagtccttcttagaagggggaacaaaatacccatgggaggagttacagagacaaagtgtggagcagaaactgaaggaatgaccatccagagactgccccacctagggatccatcccatacacagtcaccacacacagacaatattgtggatgccaacaaatgcttgctgataggagccatatatacctgtctcctgcaaggctctgccagtgcctgacaaatacagaggtggctgctctcagccaatcattgaactgagcacagagtccccaatgacggagctagagaaagaaccgaaggagctgaaggggtttgcagccctataggaggaacaacattatgagccaaccagtatccccagagctccatgggactaaaccaccaaccaaaaaacacacatggaggaacccatggctccagctgcatatgtagcagaggatggccttgttgaatgaacatcaatgggaggagcggcccttggtcctgtgaaggcttgatgccccagtgtagggaaatatctggacggggaagtgggaatgggtgggttggtaagtagggagagggggggatgggatagaaggtttttggaggggaaactgggaaagaggataacatttgagatgtaactaaagaaaatatctaatgaaaaaaattttaaatgctactgaaacagaacttcatggaaaaatatctactaggaggctgagaggtcagctgaggtcagcgactcccacttagcatgctcagggcctggaattcagcacccggaccagtttttaaaaactgagtagcatggaataaataacatgattaaatcaactttgagatctaaagtaagtcgtgggatttggatggtactgtcattaaaggaagtgctacaattaatttatgctaggttgtttttatccctttttcaagtagtaattattgcctaataatgcttttttagaaatgaaacaaaacgaattttattgattttttttcctgtcagatattatgggtacctgcctcaggatccagtcagagtggctggcgacttggtgattcagactagagtgtatttagtgggatagtgtttcttggaaattagaattaagcaaaagtttgataatcttgtctttagcaaatctgaattcccctggcatgcaatttaccctgattatctgcttggtgcctggaagctgcagttgatcctccagtggggatgctcagacccacagaggagtttctaggaaacaacataggaggaactccggctgtttcttaaaggataattaaagtggttagcaaagaactgttgccacttaaaatggaaatgaactagttgccagaactgtgtgcggtgtgttcaagaatagactggttgatccctgggatgaacaggagggagggagggagggagggagggagggnnnnnnnnnnnnnnnnnnnnnnnnnnnnnnnnnnnnnnnnnnnnnnnnnnnnnnnnnnnnnnnnnnnnnnnnnnnnnnnnnnnnnnnnnnnnnnnnnnnnnnnnnnnnnnnnnnnnnnnnnnggagggagggagggaagctagcagtatggcaggggccagcagccgcagccttgctgcccggaagcttcagagcacaccttaggatcacacagtaggccacctaattcatgactgcactaaacaattaccatattgaataaaataatgtatatggaaattcttagtacaattttagggacataattaaaaccgaccatgtaggtgctgacttgaaggcgaccttggtctttctcgggagtcagagcgaaccctgtgggagtaactgtaactggcatccagctggtgcagccttggagctgcctaagctgcgtcccctgcatcctgctggacgcacttagctgcactcattagaatctcagctgaccttgtcgcatgcatgccctgtaggttttagagtcaactttatattgaaatgttaatgatgtacattatttacagtgttacacggtagaagagatattggtaggaagttattgtagtctatgactcgttctaagcttgaacttctaaattatatgtaagttctcatttttgtttcctaatcaattcataacattaaaataaccaaaactgtcttacattctagtaaaatatgacatcatataaagtgtccttcctttgtttcccccaactgtatttttagttaatctaaatgatagaaactgtatttcttgccatttaatttatatatctacggctaaactgtagtaatgtagtcatacattaaaggatagcattaaaggatagaatttgccagagatccaggcgtggtggtatattcctttaatcctagcatttgggaggcagaggcaggtggctctccgaaagtctcagaccagccaaaactgtaatagagatatcctgtgtgaaggaaaaagggggggggggcagggctacttaccagagaaacagtagcagaaaagttaaatagaatacctagtaactcctttaaatgtgaggaagttagcataactctgaaaaatccttttgccacactgaggcacagtaaccactgatagacgctggcatagagatgcagagatgcatacctgtaggctcagcatctgagaggaggcagagaggcaaaaccagcctcgtgacacagtgaattcaaggccagcctgggctacctgaaaaccagtccttaaaaaacgctaatgtggggcatgcttattgattttgaagcattaaagtttccactctacacttccctgactagtgtcttagcttgagattaaatgagcaagtcctggttgtttggggcaattacttaaacattgggaataaactaagctatcagcacatagttaatcctgggaatgtgcatttaatctgtcaggacttacacttaactaaattgatgtgtaaaaccttcattagaatgaaatttggcatcttggcatgctcctgaagtaattaactatcaggttaggtttctctaaaatgacctcagaaaatcctgaaacacattcctcctctaagcaggcagctaagtggacattctgacaaatgttgttgaaatttacgaagctggaagttgatctccccctttgccctgaaaacataaacttatagatgtctctaaaatgaaggcatttgaaatgcatagctatggccaaaactgaggtcagtgtttcttgatgagccccaaacagagtgagcagtttggggatggaacagattgactgaagagatgctgaccatggggcctgggaggaggccatggggcctgggaggtcagcagttgatagtaccacactggagagcttcagggaagcaacataggcgtgcacgcacgcacacacacacacnnnnnnnnnnnnnnnnnnnnnnnnnnnnnnagagagagagagagagagagactcccctgctgggaagaactaggaagatggctcagcaaaagcctctctagttgcttactttgagttgctgccttgcagtcgtttcacagtcagagtccaaaagactgttgtcttcattactgtcctcatcacaaattcctgagcagcccccaaccctaaaaaaggaaatcagtctaggcaaagaagagcttggctcacagctcagatgaacacagtccttcatgtgggaaagcagcatggcagagcacaaggtgacctgtcacgttggagcctcagactcagcccatctttctcagttcccctttttacttcagtctccagccccagcccataggatgctgccacccacattcaggagtaaacctgggttaaacctctctgggaattccttcaaagacatagccagtcaaactgatcacagggacgagccatcacagctgtgaactctgaggagacagtgacagaaacacgggctaatgtatgacgttcagatggtggtgcagcccacggggggtgtgtcctgacgtgatcacttttcttgtagtggctaagacttcgggactggctacgctgtggccgtctaatgatttaggcagagaataccaataaggatctgcaagcgggagccaaatggcctgcacgttttcctctgtattggctaatacctaacttagtatataagttttaactttcatcccttagtaacagatgaacctaactttaaaattcttgacaagctcttgaaggccatacctgtgtaatctttccagtgcttttgaaattgtcactgtcacttgcatttcggttacttctgtggcagggaccaaaacactgactgcttgttggggtttcctttcttcacaaggcacaggacctcagtgtcattgaagaagtgattcggatgatgctggagatcatcaactcctgcctgacaaattctcttcaccacaacccaaacttggtgtacgccttgctttacaaacgggacctctttgagcaattccgaactcatccctcattccaggacataatgcaaaacattgacctggtgagtgtgcgcagaggcctctagtctctgttctcttattacttatctatgacgtcagagccactgcgtagcccaggttgtcttcagactcagacaagactcatcatcctcttgccccagcctctgacgcactgggatctgtaggtgtgggcgccacgccaaccaagactcctttctgagtgctgaaaggaagacgttcagtccagccaacttgtcagagctgtctaccaacagggaatctctttgggcatggactgtattttgctcagttgttttctctctctctctctccctccctccctccctccctctctctcccccctctgtgtgtgtgttaaatatccacactcaataacaaagtttatggtttctttaatacaatactatattctatcttactgaatatttatctcattaatatttttctatgatatggtcaactctgaaaatctttttttttttttttaagacagggtttttctggttgtcctgaactagcactgtagaccgagctggccatagcctcaaactcacaaagatctatttgcctctctgcctctctgcctctgcctcccaagtgctgggattaaaggcatgtgcatcactgctcggcaaatatctccaatttccatatctatcaggcctatattgtagatatcctaaaatatatttaaccattattacattattgtacactttcattgtttccagtgtttcttatcaatttgtaactaatgagcagtttgtaaataaattaactcacatttcggttatataatttggggctctttttgtttgcttgttattcgaggcagggtggctctaacgccctgcctgaaggagactttgatttattgtctgtctccatccatctcttaagtcagggtcacaggtgtacactaccatgtctagcttatcttctggtgtagttttaaaactggaactttactgagtcacaccataagaggatatctgtatttccacaatcagtacatcgcctccttttcttcctcctcctcctcctcttcctctccctcttcctcctcctaacctcgtgtgggctcgcacctcagcaacaggtgttctcatggttgccactgccgtagccatgatgcagaagcccagtgtacatgtgaatttcttctgctgagcctgacattttaggcagttctttatatcctcaccattataagctagtgtcccacatagacttactggtatttgcatacttgagaacctccacgtcacatcttaaatacaccttttctagagaacagagggacaggccattgccaggcaatgtttgtttagcatgcaagaaaacttgggtttgctctcacccctcagttgggagcacagaagtattttttctgattccaaattctccttaactgtggatttaattttcataaactcctgctttcattttgtttaaatgtatctaggtggtttgcctacatgtgtgtatgtgtaccatatgcatacagtgcccaagggggccagaagagcaagtcatagctcttgggtctgaagatacagttggttgggagccactataaccactgagccatctctcttcctcataaactactttaaaaattgatagctattagtattaatgaaaccatgaaacaaattattacccaagggatacccatctcaaattgtccctgccttctgaaataaggtgatttttgaaaactgttgactgtggtttataatttaaggttttatgttgtgtgtgctctggtataaggaaagagtacatacagacagggatgggagatgtagtcccagctctgatcctcaccctcccacccccaccccctgtgcagactgctcctaagtcaaggactagactgctggctggaagctgctttttcccagaaagcagctttatagagcagacttcatgtgacagattcatttctggttcttgtttgtaccctttttgggagcacgaagcacttatagttaagaatcatgacgctcttgagttaaagggctaacaaaaccctttctcgatgtgcattagacactgttaagctgtttctagctcagttccctggaaagctaatgaaggtggaatgtcggctgtgtcaccaagcaacctcactccgatacaaagctatgataggatgacatttgattggcaagctgagtctgcaccgggaagaactataaatatctagtgagaagcaatagtttgggatgtttaaaagtgagagatctcatgaccaagtgtgccctttgtaaggacccagaagcttaaagtgtcagagaatgctggtgtctcttgggtacatattttctaagctggatggctgctccatctacacatactggtctgattctctcacattaaagctgtcattgaggggacagcaattatctgtgaagctaccgcaaggattctcaatgggtcctgactgttatcacagcttctccagggcctggggcaggaggatgtcaagttcaaggcctgcctgcatgcacagaggatgcccgagacagtcctctgtggctgtgctgtgcttctgtccctttctccttttaaatcagtctgctaccaccgtggcccttgacgcttgggacttggatcctgtaaagcatcacctcagagtggacatcccagtggtgaagtagtcctgccttctgtttgtctgtaagtgtatcaagctctaaggagagaaccggctttgttttccaagtttgtccagatctttgcattctaaaaatgtttaataatgataacccttgccagccccagatctctacctctgtgtcatctcattccatgtgactgccatgatgctttccctcctccattctgtcctaattatggttactgttgctgcagtgaaacaccatgaccaaagcaaactgaggaggaaagggtttatttggcttacacttccatattactgttcatcatcaaaggaagtcaggacaagaactcagatagggcaagaacctggagtgaggggctgatgtagaagccatggaggagtactccttactggcttgctcctcatggcttgctcagcctgctttcttaaaggaacccaagaccaccagcccaggaatagcaccacccataataggctgtgctctcccccatccatcactaattaagaaactgcccttcttgactctagctgcatatgtaacaaaagatggcctaatcggccatcactggaaagagaggcccattggacacgtaaactttgtatgccccagtacaggggaacgccagggccaaaaagggggagtgggggtgggtgggtttgggggacttttggtatagcattggaaatgtaaatgagctaaatacctaataaaaaatggaaaaaaaagaaaaaaaaaaaaagaaactgcccttcagctgggtcttacattggcaccctctcagtcgaggtccctcctttcacacaactctagcttgtgtcaagttgacatcaaattagccagcacgcataccttcacatcctcttcctctctcacctctcctttcattccccctttccttcttgggtggtctcttcaacacacacaatggacagatgattgtgtgtacctgcagtgtcttggggcgagtactgcttcattcccagtactttccattgtgatggccaaggtctctgtgtatttctgacagacagctaacccagagccagaaactccttgtggtcacagatgtgctgatgagaggtctttgtgagctaacacaatttcagatgctttagtttggaagctctttgcttcttttctccttgtcttcatctttgctcttcttgcacatttgcatagcatttgtatgtcttaatcttcattacacaacaaacctctgaggtgtattcagtttaatccttgatttgcagataatggaacaggtttagaaagctccctttgctcacagacaaacagtgaagaaatgatagagccagagctcagggtcagatgctccaacgataaggcccggcctgctccccagccgccctctgcttctccttgctatgcctctccattccctagaaccatgtgaggtaacagtacacacaacctgaagctcttactgtttcccctgtccttcaagctcggaccgtacagagtcccatccatatgtatcgcagtagtgtggaaagagaatgtctctgcgagctggtcctggtggctcaagcctgtgatcccagcccttaggagcccgaggtagaggatcacaagttccaggccaagctgggctatgcgccaaaaaggaagaagcccggacctgagggactttatcctttgtaaggacatattcaagccatctgcagatgtaaactctagccattcctaactctgcattttggaaaggatgcagagcagaggggaacgagcagtggccttgctgccgagcacatgcatggaaacaagcagggtgagcattgggccgcgcagtgcttgcttgcctgttatggggtgagagcaactgtgcagtgactgattcggcagcatacagcttttcagttcacaaaatccacttcctatcgagagcactctgaacacacctgaacaggcctcgttaatgacgttcgatgctgatctcgctggctccttctccatcccctggagggagacagtccttggagagaggggacacggctggtgtgaagtcaccctgccacttgaatccagctcttgtcactctaaatcccatgtcctcaacatttcctcggagaaacctaaggaagtctcaccatgagtaaggtttccaacaatccaacaaccctgttagatgctgtaatcagaaacagtcctgagcacagtgggagtccagcacactcaggaccccggaagctgtaccagagcatccctcctctttactcttttgtactttacctctcctccctgaatacggagccaggctcggccaaccttggctgctgtaaagggttggaggacaggaggagtctgctgttagctttagctgatggagttgagaactggtatttttcagtaagattcggtaatggctgagtagctcaggtgggaatggctgtccttgagcacctttaatgtctgctaaaggaaggggatgtgcttttcagatgcccagatttacatcacccactgaatacagtcttttctgtccaggacagaagacggtgtcatctgactgaattaaggaacagaatagagcagttaggacaccattacaatgaagacttgagtaacttcctaagtagccaaggcaggaaatgcctgaaagaccatgctaatctctgcgtgacgagtttacagtttacattgtgtttctggtcctgaccatcttgctgcactccagaccagcccattcagccgtttgacagtcccacaaatactcagttgatcgaatcataaacgtttattttctccaaagagtgaacacagggctttcttctcttcagtttttccaaccacagtaaattgtgtcagtatctatccagttgtttaaggggggaagaacagtgtcataattggggtttcactgctgtggagagacaccatgaccaaggcaactcttataaaggacatcatttaattggggctggcttacattttcagaggttcagtccattatcactgtgggaaacatggcggcatgtgggcagacatgatgctggaggagttctgcatcttgatccacaggcagccaggaggagactggatgtcttgttttgtttttcacactaggaggagcttgagcataggagacctctaagtcccccctccacagtaacatactttctctaacaaggccacatctcctaacagtgccactcccgatgacactacaaacatttgagtctgtagggaccattcctgtccaaccactgcaaggaggacaggggaacgggagcaaactggaatggaagttggaagtcgagatttataacgagtggttaggaagctctctgaggaggtgcatttgaagcaagacttggagaagggcatagcgagccctgttgctgtctggacagattgctcaggctgagaacaggggtgaggtgaggtgagggagaattgtttgggaaggaatgggagaggatgtgtcgagaagatggataaggccaggtaatagccactcctttgtcagaaccctctcagctccttaattaaagcgagtggagaccttctatcatatgataaactatacctcaatatatatactactaaaaaataaaattcatgaaaggggttctgcctaagatgttgaaagatatctactcagcaaatcaaatgtataggaggttttttgttgtttggggctgggatgggttggttggtttatgtttgttttgtttttatatatcagggagctgaggtcataggcaagcaggatgcctggatctccagaaagaatagacacgctctcccactattctctaaattaaggtgagatgccagggctgggtccatgtggcacagcatagaaggactagaccactgctgtacaagtgaatgaacagaagccaagttttgtctgaggataaataagaatagcctaagatagcatgcaaaaccccttgtgccattagaacacttggttactaagaaaaatggaagaaaacacctatttgggagaaagtgtcaaaagactgcattatcctttaagaataccattagagctatctgtctgtcacaaaactcaccctagggttatttggctgccgtgaaaagggggaatggaaacagggaaaatctcacactggacccttggcatacaatctccttaaagtcatagtcttaaagtagcagggccagggtaactgctttctgccactagcctagcaagcgctaagtcataagggatggctctccgctgctgagaaaggatcaaaagcacatacacggataaccaaaagcagacagggagcaggtgctgctgtcagaacctgcagggcctaagagaaggctcattaccattggatggtgcagtaggcttgttaccatcggatggtgcagtacactgaaaggagccatagcaaccaaagtctcacatccagtcgcatccagcttaccctctgagtaatcgctcatcctcaaatctggcccaccgtcaaggccacctcggtctctacagctctctgcacagtgtccagggctcaacacagtgagattcccaccccccaaaaatcaagaaacagcagaatagactcagtgagtgattcagatgttaaaactctcagccaagcacttacattattatcattaaaatgaattatcattattgataattgttatattttatatgtgacatatattgtgtataatatataagattatattatagtatgttatattttatattataattatatgtaatataattagtcataacaattgttattgattataaaattataagtatcattacattaaaatcattaaaatgtctaggacaactatcaagaaagtatgacgcacacacaccccaccctaatccagactgaagtgtggcttatacagcctgtgaacagatatcatcatctatagttttaaaaagaagaatgtaagagagaccctgcattctgactcacagagcttgggatactctctaccttgtcctttacagaaaaagcttgccaactcctgacctggtagaataggtgacaatgtgtataaactgctagtaatattttcccttgtatatcaaatagaatgctgtgccagagaaccacgatgccgggctcgtcagtagtcctgggtgtagccaaggggctgaagatgagacttttaaaaacagatcactaagagtaatgctaatgaacacagtaagaaaggagtggaaaatgagagtggaatacccaagagctatgaggtgacattagacagtccaacatccgtgtaattggggtgtgtcagaaaagagaaagaagaacagacctaagaaacaaaaaggcatcaaagccacagatccaagactctgggagcactccaggcagagtcggtctgttgaacaccctcacactctttaaatatctaaaatgtaaagaaaagaaagcatacagacttgcgtgcagttaaagagcagcatcgtagactcaagccttgagaacagaggaaggcaaatggtaacagaagtctcccggtcagaaactgagacagtgaatggcactttaatgcaatggggatgacatcttggtagcctagaacctactccacagagaggacagagtccagaaacatgtggaggtgtggtcagacagagaaagcctgctgctgttagatacactgtaggagtcctgcaggaacttaacccgagcaaagagaccacacttggcaaaaactcggctctacaaaaagaaggcaagagttcccaagtggagagtggagacgccacagggttgcgcctgacttcgattccctagcacccatgtaaaacccagatgtggtggtacgcacctgaagtcccagccctggggagtggcagagggtccatggggctttgctggaggcctgacttgttttctagaacacacaaactctacagagttgtcctctaacctccttctgcataccatagcatgtatgtccacaacacacatcatatacacacacaggcgtggggggtgggggtggggtgggtgtgcttttaatttaaaaaagaaagaaaggaactgagatgaggattgcaagttccaggtcagtttaggacgcataatgagaccctagtttttgattggttggctcattgaattgtttgttttgaaaacatatttggtggcagagcacttgcctaatatatgggaggaaagccctgtgcttggcccctagcaccagggcaggggatttgagtcacctaagtctgagctccatttgtcacctaagaattggagacatagtgacactagaaggagcgctccagccacatctgacactccatccgctcacagctctttcatccgtacataggaagagatttttatcagcctcatagagtcactgtgggcatttgataaacagtatagagagactgcaaataaataaataaaatccacgtggctaccctgccattctcctggtgacacaagaattcatcaatggcttaaagttcatccagtgtaggccacagagggaacaaaacagacctgtcatcccagctctgtatttggttaagtgacatgtgaaaactcctgcttcagttgtgtctctagtatgagtggtgtagcttccactgagctttgagtgtgagcactttgctgtcttggtcagcaatcccccctgagttgcactagtattccttaagatcataggagggcatattagagcttcatttattcatctgaaaataaagagatttcgtcttactagtggtattgacaacgggctggcctgagttggtagtagagctcttccttgataggatcagctctcacagtgtgccaaggtgaagggcaaaactctgggtagtctgagggaaggaaggggaacctcagttcatggaggaggagaaggaaagaaaaaggaaggaagaaagaaaaggtaaaaaaaaaaattgtgttcctctaggatctggattcagttagagaaatctttgaaagctgtcatatttatcccccaagttgaaagaaatacagtaagatcagcacatgtgacaaaggacagtgcaaaattgtcatctcctcctagagcaggtgccaccttgtgaagtagaagtgagactcccgtgcaatctcacaagaactgggtccatcacctgactaggaaggtgtctgtttggtgctctggattaggcattgagtctcccgggagtggcagcacatacctttaaccccagcactctggagagcctgggctatagagacagaccctgtctctacacaaacagataagtagattagagagagggagagggagagagagaggagagagagagagagatgtatcaatggaccgatggatgaataagatgagtcaactctctccttccataatacaggtttccgagtagatcaccaggcctagcagcgagctcctttacctacggagccatctcgacatcccatgcgtgccttcttagcctcactttatgctcagtggttaagaggtccggctgctcttgcagagggccagagttcagttcccagcactggtggctcatagccatcttgcagatgcatgcagctccaaggaatctgataccttcttctgtcctccttgggcatgtggtacatgcaagcaaaacatatgccacagaatttttaaaagaaatctcttactagctaattctgcatgtagcatgttacataatttataaataaataaaacattgcaagtatatacttttttttacaacttgtactcacagttagtcagtaaagtttgagaatgtctgtctgtcctagcttctggttgactctcagaaggcctgagacatcagttagagggtccctgagcaggcccagggcggccctggtatttcacgaggcttctgatgatctgatgtatttggaagtcactctgtaaatatacaaaaactgtaagcctcggctgtccagtctgggttttagtcataaactaattcattgggtttttttacttcttagaattctattttcaacacgtgttccttctcaatgattttgactaaagaatttaattttaattaatttaatttgtaaggctaaatcacaagaaattcaatatttatgcatttttaaccgttgtgtatatctttgctgcatatttaatttatttttaatttatcattgtgtgtgtcagatatgtgtccatgcatgacactttgagatgggtcccagagattgaactcggatcaccaggcttggacagcaagtgcctttactcgcctagccctctcaccaacccttttgtatactttaagattctaacaagcctttggtaacgtgttttctctttgtgatgtgcctgtcgccagtacttagttccctgtataataaaatcccgtcatatgccttggacactgtgaacagagctttaatcccagagtccccaaaaaaaacctgtaattgtgtttaacacatatgaaaagccaacctgttgtgggcaaaatgagcagtttgtaaagtcgctggctgccttatggtcgctccttgcctgagcggagaggtacacacttgccgatggccagagtagtgtcttctcccagagtggaactgttcctgtggcatttgcacagcatggcaactgtctactaaaacagttaagaaaaatgccactactctccaagagtaagtacttatgagagatatttcaaagaaaacatgaaaacgtttttttaaaaatttgtgttacgtattttacatgtaaaatagaagccatataggaaacaaaaggaagaagttcaacattttaaaatcttcttttacatattttttgggggaagcacaaatatggggatcaggtgacaactcagagaactggttctctctctccaccgagtgggtctcagagatgggactcaggtcatctggcatggtggcaagagcctctacggctgagctgtctcagcagccggctgttcagcctttggaaacatgtgtacattttagccggtctgagtagagaggtcagcagtcttgctgatctgcaacactgtggatgtaatagcactttcctgggaacctcctacggcattctttgtggtttgctggaccgcttggttggcatggattctgcagaactcgggcttgaacccaggacttcacataagctatccgtcgttaagacactagctacacctccagtgccactggcagtggccttgtgttgactttggtgtgtctgtttctgtttctttgtgcatgcgcacaggtgtggagaccagggcaacctctacaccttccttcaaagacaacacagcactttccttccttccttccttccttccttcctttcttccttcctccctccctcccttccttccttcctttctcccttccttccttccttccttccttccttccttccttccttccttcctttgtttttgttttgttttcttttcctgagacagagtcccttagtgacctggaattcaccaggtacagtggtctcgctggccagcaagtgccaggaaccctcttgcccctgcttctctggcattgggattattatcacgggacactacttccggatttcttatgcgagacccaggaactaaactctggatctcgtacttgcaagacgatctccacccatatgagacccctaccccacgacctttaatttccaattagaaatttccagggtcctggactggggctgtgttagcattttgctgcatggttcaggctatatagtatcgccagacggaagcttgctgttgctctccctggtgattggcgctaagaatgctgcagatgagttgaaatcatagatagttcccagataccattttagctgttaaggttcttttcctacatgccctcttctgggccctcatgttaagcttggatttgggcacactgaggagtctgccttcccttcccactttctgctcagcaccgctctaacacaaagaataaacagaaaacagagctgcatggaaggcggccggataaagcctctcaactcacaggatggccagccaccacgatcacagggcagactcatagttgccatcaaaccctgtagagaggccagcagctaggaggtcagataaagcgaggtccagatcccgtaaaagcggaagaaggagggcttgcctttgggtgagagggcgtcaccgaaaatccatttccagcaacttcgtggttcaatctatgcctttggtgtcatgcctgtaatcctggctgcttgggaggctgagacaggaggactataagcattattgataaataataacataggggcaggaaagatggctcaggggttaagagtgctggctgttcatgcagagggcctgggttcacttcccaacacccacatgatggctgacaaccatgtgtaactccagttcctggacatctgatgccctctctgacctccgtggacaccaggaatacatgtaccacacatgcgtatatgcaggcaaatcacataaaatcaaacaaataaatatttgtttacatggctctttctttacaggtgatctccttctttagctcaagacttctacaagctggagctgagctgtcggtggaaagggtcttggaaatcattaaacaaggggttgtggcgctgcccaaagacagactaaaggtaagccggctacagaattgcccgtgacactggctgttggtcactcaaggcacatagagatcagcatccagcaggcatgactcagactggtactgctcaccagtgctcatgtctgagaggctaaatattccctctgctgtctcctgataccaaacccgcagttcagtagagagtagccagatatgcgttcacatcgctgcacaccccaccagtaagccctgcacactccatgagaactcatagttaccgggtatatttttaatcctgtcaaacaaactgatgccatacaaacatcacaaaaggctaatgggcaggcagcggtgatggcgatgccaatactgtggtgtccggtgtttgttagtgcctcccagtgtcatgccgggacctcagcctctgagtgtaccacctcacccgataccctccctactcgagcagccgctgttaacagctgaagtcgtcaggtgaagagaccagcatggaaagattcatttccctagagcattccaaccaggaagtgcttgagctgagtcgagcccaaggcagtctgtccaaaggccttgcttgtggtccattactgcttactgtatgccttcgtacagtaatgggaagaaaagtacttcgtgggaaagggggagatgctgcatctgacgaaaatactgtacatctgtgtggcagaggcactcctgaaagggctgaaagtccacgcctcagacctgaccccttagggcagtgtttctcagtcgtccctgtgctgcgtctctttaacacagttcctcatgctggggtaacgccatccatacaatgatttttgttgctacctggtagctgtaatcttactactgttatgaattataatgtaaattctgtgctttctgatggtcttaagcgacccttgtgaaagggtcttttgacaccacacacctcgcaaagtgtcatggcccccaggtagagaagcactgtctcaaggtgaggatgtttcatatgtcaaagaagataattcatttctcaacttatgatagcagagaacatggtaatgtctgtaggccagaagcaaggcattttgctgcaagcacaggtagcttgtaacgatgaagaaattagggcagacattaagcagaactgttgcccatccagtggtcagtggtgtcgtgaaaacaaacctgagaaaggcgttttcagctcggcatccctaacctcctctctagtctgcttctgtggcctcctgggctacagaggagagccaagatccttgcctctcctagaatctcctctcccccaggagtctaccaaggccgatagagcgttggagggcaaaagaggggaagctattctccagagacagacagacagacggggacacacacacacacaagcacacaaacacacagagcttttagtcagctttccgttactgtaacaaaatgcctgaagtaattaactgagatttgttgtagcagtttcatcctgtggatcagttggctctgtttctttgtgctagtcaggaaacagcatgttatgacagaagctcgtgacagaactgagttctgtgcctccttcaaagccagggaacagaagaaaaaaaaaactggagtgtcccctcgtaacctgcaaacctacccagttcctcactgtgtttccacttgcgcatctgccccacgagcaggagaccagttcctcagtatggggcctttggagaacatccaaactgcagctcctgtctgcagtaggtggctgaggttgtcagtggcagccagagatgctgacgtgtgcagcagctcacccagagctcttcagtgcctctcgggaagtcctgtggacttgagtagcttctgtttaccctatcaaacctgtctggagaagtagaacccgtgatttcagtagatagtgatttaatatagaagctcaaaatctcagagaagcctgaaggagcacagcgaaaggaagccacagaagctgccaggctgtccccaccagtgacctgggttgcctggagcatcaaagtgggggtacaggaacagctggccaggcttcagccaaagtcttgacactgggtttcctgtgccgatgagggtaaacacgcacatacccccttcattgccatagcctaaggctaagccctgcagagccctgctgggaaagtcactgcccgactccatagaatgaaaggggcggagagtgttcagcaacaccaccaccaccccagacagtgcagcacgaggtctgtctcaggatgctgtaacgcatcatcagaaggagcagcgtgagtctgctcagacagctgcagactctgctgggggttttatgaatccaaggagccaaggagcaagctggggtctctagtccagaaggagaggacaaggttacagttacatacccatgtgtcctttaaacaaaattgaagttcaaggtaagtaaatgaatagcaaaggggttgttttgtgggttttttttttttttttttttttaccgtattctgtatttgacgtggtaaatgtacatacttacattttagtgcaagtgttcatgtatggggtcagatcagggtagtgacgtatctgccacctcagacatttgctgtttgttctgggagcattcacaaattgtcgctacaagctgttaggaagtgttcacttgattagtgccaaccatagtaattctcctctgctaaacatggttcaccccacatttccatcagccatcgtcctcctacacacccttgctgggctatggtaagcactcttctccactccgctgctcggcggtagatcatgttgtactaccacatattagtgagaacatccaatgtttgtctttgtgtgcctgacttctgtcttccatccatgttgctgtaagtggcagcattatttatagttgagtaatactccattgtatatgtgtaccatatttccttatccagccactcatccacagccaatcaacaaggttgattctgtttcatgactatcgtaaagaatgagaaagagaagggcaagtgactgttttatatatgtacctgtggtggtttgaatcggagtggcccccatagactcatatgtttgaatgcttggctcatggggagcggcactcttaggaggtgtggccttgttggagtaagtatgtgactgtggggatggttttgagggtctcctgctcaggctagtggggcagtctcctcctgctcctgtggatcaagatgtagagctctcagctcctcctccagcaccatatctgcctgcatgctaccatgtttcctgtcgtgacaataatcgactgaacctctgaaattgtaagccagccccaattaagtgttttcctttataagatttgttgtggtcatggtgtctgttcacgcaatagaaaccctaactaagacaatgccaatactaagattgtcagatttcttagttagggtttctgttgctgtggtaaatctccattatcaaaagcatctcggagatagggtttgtttctttttacagcttgtagtccatcatccagggaggcctagtcaggaacctagaactggaggcagaggctgatccagaagccctggaagactgccccttgctggctggccactcatactgcctgctttcgtagttacacagaaccaccagtctaggaatggccccacccacagtgaactgggccctcccacatcagtcagtcaagaaccatgccacaggcttacccacaagccagtcctctggagagtccctcttcccagctgactctagctgtgtcaggctgacatcaaagtgaccagaacactgagtctatttctagttttcctggtatagtctctgtactgatttcttccacactgtgccagtctttttaatcttttgacactgtttctcacatttctggcaaatgtaacttgtcagtaaattttagaacttaaattccacagtaatagtaatgctaagatacttttctaactgtttttatggctatgagttgttcctgttgtcaccacagctttctagatgatgtagctaagacctcaagacattgagtaatgttcggatacaaagctgggcccagctacatgctaaaccaaagcagcctttctccaggcagtgttttcaccctgtgctagcctggccactggctatggtttccggacgcatgagttagggttagtgtgagattctatttggtattatattagtgagcccaagtgtgagccagagacgcaggtgtggttacggtgaagagcctgtgaatcacgttaagtgaggagggagagggtcccgggagatacctcgagcagccactgcaagcattgtcacaggtgaatcaggcgtttcatcttcagggtggtaagtgagccaacagaactcttattcactttaagaaggtgtgtcttcccagccacttcctgagacatacctgcagcaaagtctgggggcacataaaaccatccggggccccgggggctcgaatcggtggcaggggagagctcagggaagacgtcctgtgggagcctggcaggcggctccgttggtgaagctgcttgctgcacatgtgtgaagatccacagcagccatgtggaaggctgggctcagagagaagtctgcaaccccggtgctggggtggaggacaagtggaccccagagcccatcggttagctagtctgaccaacttcgtgaactccagattcaacaagagaccctgtctcaaaattaaggtggaggggctggggaaatggctcattggataaagcacttaccatctcaatgtgaggataggagttccagtctctgagacctgtgtaaatgttgggtgggcatggtatctaactgtaattacagcatttacaaagtgtcagagcagttaagtatccttagagcaagctgtctacctagcctagctatgtcggtaatccctgagttaggctgagagaccctgcttcatgagtaagacagagagcagaagggcagaactcctgatgccaacaccaccatacatttgtatatacaacacacacacacacacacacacacacacacacactcacaaagtcttacgatggaaggctgctcagatttataccaaagatttcttctaattcttagagcctagaatcgtgtcttttctgcttccatgctgaattctgtagagcagagccctgttcccagcagataaagtctaaagttactctgggattctagatagctcatggcccctaagcctccttgcccggccttcttcctccccatcccccttgctccaggcagctctgcatctgtgtccttccctggactccctttgtgggtttgctcctacggctctcatctggaggtggcatcccttttaccttggccagtcacttagtcagatcctgaacatcccctcagggccccgctgaatttcaaaggatgcctgaagacttcccttttattcttgtatggctgtgtgtctctcagtaaaatgcccagagcactgtatccccagcatctcgtcctcttctgccctgttttaggtatttaatgtctttcccctccacagtagctgatctgcagccccagctgcctagttcagtccatgaagtgggtggaggggtgagccggctgtgtgtactctgtgtgggaagtggggggccgttcccatgcaggaggtgagaagtcaaaaattctgtacctttagatgttcttttcaaaatgtattctgccatcttctagagtcttaatacctgtaactgcctccccctgttctccacactgtcctagccacgatggctacagcagaggacaagaaaacaagccctgctcccatcgaacaggctgtggagaagactcactctaagttaaaatgtaaaacaaatggctgtcttagaaagtagtgactagcagagaagtcaagggcagaagagggtgggcaatgggtgggggggttgggaagtgtggggacggggtggggcggagtccgtggcagagtctgtgctgttctcgttgctgctgtcattgtgtgttttatttttacggaatttacagttacagaaaagtaacataagtagtaggcgttccaacttaaaggcagtccaggtaaaacgcttcctggatctatggccaggcacagtggcacaggtctatgaggagggtccttggtgagctccacatgacagagctgttctctcacaaatgaacagcgtctttgatggtaacaccaaggttatgctctggcttccacacgcatgcacatacactaacacacatatggaacacacactcacactggtgtcctacggttaagaagccacgcctcccacatgcttgtcattctctccctgtacccaccctgctctctgggagcctccatgttacctgccctatccccttagtctcctctttcgtggtattggtctgtattgtattcaggttttcccggtactttctcctggttctgttgaagttgcttgtatatggccagagcctccgaagtgttcacagctgtcgggagtgtggtctcttcaggacacttctcctgaaggtctactggcatctccagtgaagcgaacagctgtctgttcctttggaaatgttagatgtctctcctttggagtcttgccctctgatcttaccatccatcagcaggtctggctgacaacagaggaacgaccactgtgctcatttgctaaggctgactctgtaggttttagttcagtgctaacatttgtttatttttgcccagatttctctagctttggccagtgaactcctggggttgatttccttgtgctttgccacaccccactttgtggactatgtggaatgctgcaaattagtctcgtatcttctgtgccccaggttccagacagagctgggcgctcagctaccttttgccagaccattgcctcctcccgctctcccattaacagctaatgcattgggttctgcctctgccctgcccaggcacctttcttgtttgtctcttcctggtatgccccagctcctttctttcacctcacccttactagctgtgtccttggtcccttctgacacagcctgatctgttttctacttcttttaataaacactctttgcccaagaacccttccatgggccatagaaaatagagaggcttgacctataatattgaccttagagcaaaatgaattacagagtgcacgccacaatatgtgaatgtattgtctttttactgtactgtactcaggaataaatgattctttgagacagtcacatatacatggaaatgcagccttttatggttatggccagtagagaaattagttgatctttgggggttccagagaagttaacccttgtttagagtaatatactattaaggccaaggtcacacgtaaatcctttaagtcagacaagtagttttgttctggaacataggggaaaaaaatgtacccctgggctcaggctgcctgcactctgtggttatagaggttggaagatggatggctccgtttaaaaacagaaaacaaaacaatccatcacccgcactagaggggaagccgaagttacatttcctcgcacgtggtgagtcatgccctgttggtctaaatgagaacctgtcattaccacaggtgctgctcagaaagggctgcttagcttcagagccgaggcatccctccattgctgaatcatttttagggttgagtgtttataataaaacaaatcacctaaaaccttgagagtttaattctcgggatactgcgatgtgtgacgttgactggaaaggctgtgtgcattgaatagtcttggtataccacatgcgcgtgctccgagtcatttagggtcgttggcaatacaatatcggcatacatgtgataggttagtaggaatagatttccaaatggaaatactattttaataaatgctatggaggtgtaaatggtgtctacatggtggtttatcacatatattaaacactaaatttcagttttttgacgaccttggcttaagagaaccatagaactcaggaattttctcatcagctaggtagatgagcttgacgttttgacattcttccttttattgaagaatgaaaactaaatctgtacaattactctcccaatattggacaagtagactctaagatctagagcacggtaactggcattcaaccaagtaagatagttttcaatcaaatgttactgggcatagtcttctaaactatttgcttattagtgtgtgggggactgcatactcattggctaaatctgtctatacagttaaacaagcgggctggattaacatcagcctacacgttctcttcactagtgttccatgagaaaggcagctcgggctctttgtggtctccggacctcccatgtaagcaagagactaaacagcaagctctgaaatcctgagttgctcgtttctcttctagggtttaatagacataaagttagtatgcccttccccagccacatctgcagccatggctcaaagctctggggctctgcatcctcggctcggcagggccctggctcccattttgctggctgggaacagtttgaacagactgaagggacagaagtcatccggccccgttgtgctcactgccactacagcttgtatatgagtgtgtacggttcctggttgtccctgtcatggattcagttaattatctgtgttgttggaggattaagaatgtaacctaatttgataattaggtgatattttcaaggaaaatgcaatcagaagataacttttcttttagggcaaataggaaattgtggagtaacttgataagtcgtaattaaaagtggtagccagctcacactaaatgaagttactttgtggggtggggaagtgtttgtttgtgtgagtggaccacagtgcatgtgtggaggtcagaggccaacctcaggtgtcaggcctggctttcttccttgtttgagacagatttccttactgtttgctgatgtgcacaccaagtgagctggcctctttagcttctcatgattctcttgtctctgcctccatcctcccgggagattcgacacttagactacttgtccagccttttgctggttctgtagcctgaactcagttcattgggcttgtccagtgagctctttccctgccaagcaggctccctagcctgtcagtgagttttaaaagtcttcatttttttaaatgtaatttttagaatattttcattgttgtcattaattgcataaagagcgtctctaatacacacacaaagttggattgatttgtctggagggtatcttattaaatttattcatctgtgagtgttttgcctacatgtatgcattgtatgcttatgggacatattttatagatttttaatatggtctttaaaacttctttttcctcctgttgagaacctcttccttctcttcccaaatgtcacttctgccaggtatctgattcctgtaatggacaaagtacattataacttatgagtgtggtttgactgttcattctacccacactagtcattttacactgcatgagcacagtggtgctggctatcgtggaggagggaaggtacatacaacctcaggaggccccaggagagccaggtacactcaccagaggtgctaacacaagggcagttcactttgtcagatggtagagggggcaagttctggaaagaagaggttactggactaggcagggagaatgaaggcgagacaggcttgaccttgtctgtcttgaaggattggaaggttttcataggccgaggtaaagaagagtagcttgcaaaggaaacccgtgagagtgagggacagtccagggcactgtagcctagtggccaacagaatgactcatggattcccctgccaagtcagtgtggcttttgtcacttgatgatacaattatgtccttagactagtgcttttcaaacttttttaactgtcactgccagttacacacacacacacacacacacacacacacacacacctgtaccatgtgtagcactgtactcatttgcatacaactaaaacaaatttgtgtaaaacagtactcattgagtgtactggctggttttgtgtgtcaacttgacacaagcaagagtcatgagagaggaaggagcatcagttgaggaaatgcctccatgagatccagctgtagggcattttctcaattagtgatcaagggtgggagggcccactgtgggtggtgccacccctgggctggtggtcctgggtctataagaaagaaagctgagcaagccaggggaagcaagccagtaagcagcaccctccatggcctctgcatgagctcctgcctcaggctccagccctgcttgagtcttgccctgacttccttcaatgaaggactgtgatctagaagttaagccaaataaacccttttctccccaatttgcttttttggtcatggtgttcatcacagccatcgagaccctaactaagacactgagtatgatgggctcatgaccctgtatccttttgaattgatggccaggcctactcaatggatgtaaaggctggctgctgtttagtgtcttagaattttcaaaatccatgatagttttaaaatgtggtcttgagaggaaaggtgcatctccatcctctgatttcaaaatgcagatcttcgggcttcatccagacctgtggcccagtactgctcttgccaaagaccaagttcagtttccagcagccacacctggctacgtgcacatactccacattcaggagaggttacaacactccaagttaccattgctgcactcaggaagaaatgattgaggagggatggcttagttaaggaagtgtgagtttaagccctagatctgcataaaaagttataaagtaatgtatgtttataatcccagggctgggattataaacagtcaagatggtctctggggtttgtatgcccgccttaccctactttagtaagttctaggccagtgaaaaatctatctccaatacacggtgcagctgtggggatggcacagtgggtaggagcacttacagcacaagcatgaaagccggggttcagtcagattccccaaagcccatggacagagctgggcatggtggcatacacgtgcctataagcccacagctgtgcgcatatgaagacagcaggatggctgggcttggtggccactgaccaagctctgggttcagaaagatcctgtctggagggctagagcaagacacccagcacccttctgcggcctctgtgccacttcttctaaggaaccacacccaaagctgttctcctgccttcacacataggtgtacccacaaacacacaccaaaaaaactcaaaggaactggctagtgaatgaagtcaactcctggggatttcagcaaacacaactacatatcaattccatcccagtaatttctgagagcaggacctgctggagagcatagcagaccattatgatatgaacaccagacacacggccatgctgccttgtctaggaacaaggccagtgctgctggtctctagccgtgaggcttttgagagaattctatttaataaagtcacttagagttcttctaatctcaggtttgcaacgccctctcggaaatcttgatgacattttacattttgagagacccctcccacatgatctccacttctctgccctaaccaaaactaggggcgtgaaagctggaccgacagacagccttatggactgacacacagatggaattagaggtggttcagcttccttcccacaatagacacctattgtaattctcgctccctcttggccacacctatttcatcagtgagctgggcactatactcttgtaggttttacttcctatttcctttgacagaaaactcagtttcccaagtccttccctgccatttgtaccacttatatcccatgatgccctatgtgggagtgtggaagtatatgtgggggtggggggtattcatctcccttcatcctgggttccctggtgtgttgtctgtttctaaccccattcttacttctccgatacactgccttgcacagaagactcactaaatactgctgtatggttgaaagtcaacttgagaattaagttactactttcagatatggtaatctgagaatcaaccaattaaaagcctccaaagaaaactgctacagtgtgtgaacaaataactcaaaggaactggccggtgaatgaagtcgactcctggagtcggcactcatttagaagggagatgtaggctttatatgattccatttcctcagcttttatcctggaaccaagtatcatccaggtagtcacagcagggaaaggcaattgctcttaatgaagaactcagactctttctggcttaggaaaccacaccaaggtcagcctgagagagatggatgccgtggagagaggtagactcccaaaagtcagccagacggatcccagattgtgttcctccagatgtcaccctgactcctgagcagtgtgtaagacactgacctaaaacagccatgccaaaggccagaaatgtgaagtagacaaaaaagtgcagccctagagatctggaagagtgaatctaggcacagactcaagaaggtctgtcctactgaaagaggggaaacagcaagctgtgttcttgtctcttttgtcccttttgaaagcttggtctaactgtagtccgtgcccacacagcagaatcagggaacacatgggaaagtggcagcctctctggcctagagaatcattaagggaaggaacatagggtctgaaaccctaagaatcatggaggaaccacagaagagaaagaggggttcctaagacccacaaccatgactggaccgtgatccacacctgcagaatcagctcttatgtcccagtcaaggatgggggagggctgcccagaaaccagagcctgctcaaaatacggagactctcaacaacttaacattaattttattcaggatacagtccaaatttttccgacatcgaaagaatcaagaaaatggaacacattctctacataaaagaaaatcaattaagctccaccccaagatgaaccagatgttagaacttacagacaaggatctctgaagtaactcctaataacgaacgcttctccattttttcacatgacacatgtttccaatgcatgaaaatttcagtagagagatgagatgtctcaggcaagcattggaaactgtacacaaatcccaaatgggggaaagacagaggtctacagaccgaaatgctaatacaagcggttagttacgcacagggaacctcatgcggagatgcgctggcatcaaaacagttaacgagcgacacagacacaccaaacagagccagcaatccagggtagcgcgggtctgtgggagcaaacaacaactgggcggttacctgccctgctctcacgggtgaccacagggcctcaggaggctggggcagactctttaaagtgctgaaagaaaaagtgtgaacccagaattccctgtcaggtgaggagagctctcaggatgaaagccagctgaagactggagggaaggagggttacaggcggcgtgcctgctgctgctgtgtgatgctagagggagttcttagggtgaacagatgggaatttgaattgtcaaaaaaggactgtttgtaagaaatgataaatgtccaggttcctgcgagtttactgccatgtctgtctagttgataatgtttgtagaggaactgtatgtaaaaactacagaacaaaggaggggagaagagggatatgggcctgtatggttatgagtttatattgagtttatatttcacatatttcacaccatctttgtgaagattaaaaaagttacagatctgttttgtaatctatagcagccgatatgaaatcgtataaaaatgaataacccaaaagacaataaaatggctccgtaggtaaagagcctcactgtgaaagctatagtgaccagcgctcagtcctggaagccatgtgcaggtggatggagagagtcgcctcagagtcatcctgagttatgccacggcacacacccacccccgcacacactactaacaataataataataataataataataataataattcttaaaagccaaccaaaaaagtcgaactgtaaagaacacttagatagtatagggtcacccccacaaaggaaggaggatagaaatgaaggaacaagaaggcagctgaaaataaaatgacggatagaactacggtaaacagcagtagcccaagcgcatgcagaaggaagagttgtcacgatggatgaaagaagacagcaataagccacctgcagaggatgcaccttaaccataagaactggggtgaaagtcagtggaagaggggctggagagatggctcagcagctaagagcgctggctgcctgctcttccagaggactggagctcttccagacctcacaggcaccgtgcatacaagtggtgtatgtacatacatgtagacaaaacaaccatgcacataaaatgaaacaaaccagaagagacagaaagtaaatggaaggaaagatagaatgcagacaagtgagcaggaagccagtgtacccagcacatcacgtcagagcaactccggttccaagtgctgtgtggctgtggcaagtgtgcgtgtatggtaacacacttcaaaatcgtggaacaggaacattgacaggtgcgtggaacagatctgcccactctccttattggagattcgcatccttcccacagcaactgataaagaactagaccaaaaaatccagcaaagacatgagagatctgagcggctgtcagccacctccccctgattggcatttatagaacatcctacggtggcagaactcacttgattttgaatgtgtatggcacatttacctaagcataccctattttgagctttatgactaatttccgtaaaattagaatcatcaaactagaattagatcagaaatcgataaaatgccagaaaaggcagtgggtgacaggaagcgcatgtgcagggagtcagagggagtctgttagcacagcacgcctgctcaaagagcatttatcaggttcaacacttggaattaaagaaaatttgtttgttttctgagacagttttctctgttgaacagtcatggctgtcatggaactcactctgtagatcaggctggcctcaaactcaaaagagttcctcctacctctgcctcccaagtgctgagattaaaggtgtgtgccaccactgcctggcaaaattagtggattttgtgtggattagcggactttgatatgcaaagaggaggcttagaatgttttatcatgattccctaagaacccacagcctgggctctgaagccggagagctggcaaacactgcccaccaggaacgtggtttctctgcagggtgccaggtgcctggccaccgaagagaaaagaagcacgcgaggcagacaggtgacagactcagagtgtccttcctggtgtccttccccacagcccactttctgtaacagtagaagccgggtaaatcccagtctcaggggtgagtgctttacggtgagcagcgagcttcctacctaagcagagggatggcctgtgaaggagagctcagggccggcagcagcggtgcgagcctggcacgggccacccctgatgttccagggacgccccggcaggaactggtgtcagagtttcatagtaccttcaagggttattttcaaacaaaatacacacttcacaaatgtcttaaggatatgcgcactctgtgcttcataccgttactacatttttttttatgcgataactacataaaagccagatgtctccggagaaatcattttgcattaccgctgcctctaaacaaacagcccagcagttgctgcgggaacagagctgtgaattacttgaacgactgcgtgtttcaacacacgttcctggagttcgttttgggcatggtctctgcagcacgaggagtaaatcagaagtcggaagtgacttgtgtgtctagaagaggaacagcacgcagagtttccttaatatgtcttccagactcagagttaaaaacataatatttttcatgtgatctcggctgcactcacagtcatgtttaggagcatgtactcccacaagaggaaacacgttcccagagtgtgtcctgggaactgaaagctaagggcgggttgtttgtgtgtttgcttggctctgctgctgtattcagtgtttcctcagtgtcgtcgtcgtcagcgatggccaccatcaacacaggaaatatgtgctaacacgcgttgaagtgtgtgtgttggggtggaggggctagagctctttttagggtagatcagacctttgccagaacagagcaggaagtaatcactgtcctccactggaaagcacttcatggcgtgttttctctataaaacagagcaaacgccctttgctccttcagcctccctagcccgcaacctcagtcagcacctcttcttcccaactcgccgcagtcaatgtcctgaattcttcatttggagacgcctatggcactgcatggcattacccatgtcccccaccacagccccgtcactgggtagaccggacacctctctgtagtcttactcgtcatatcccttgtgagcgtcacaagaaaggctccagaatgtgtaccatgctctggaccccactggttctctaagggacatagctgcttattgtaaccatgcatgtctgtaaccctggtccttgagtgaagcctagagaaggagcgatgcggagatgagtcattgggtcaagtgctcactgtgcaagcatgagaacctgagttcggatctccagtgcccacacagaaagccatggagcgcacacctgtagtcccagtgcaggcttagggcagcagaggcgggacgatcccttgggtgtgggttaccaaccagccagtgtaactgagcctctgtcttcaaaacacgaaggagagccagcgagatgatcagcaaaggagggtgcctgccgttgagccgcggcatcctgatttcaattcccaaagcacatagtggaaaccgagctgtcttctgacctccacatgcatacacatgtgttgtgttcgtgtgtgggtgtgtgcatgtgttatgtatgtatatgtaaatttaaaaactaactttaaataactaggccgagagtgatagaggaaagcatgttgttcaactcctgaatgtacaaacacagacacgtgccacctgcccagtgcacaaatctctctcgaatacacacacccctgcctgcagagaagtgtaaggaaagatggtaggtataagggacaatcccacactaggtccagcttgtctgcagctagcgtcacccccaccacaggtcccattgcttggccctcacaggggatgattctggacttaacagcagcagcacaatcctagaaggaggaggagacgctgaggggcttccccttgctgttgatgagtgcctcgtgctgtggctgcgggcctgatgggacctgaagggtcttgccctggccgcctccccagtggctcgtcacagtctcctgcttggagccatgagcctggctacatcagagctttgctgaggccactcagcgtcgtcccctggagtcttccttgcctgcctccctcaccgcagtccccgtctgccttgggaatctgagactgtctgaaagcagatgcattcagaagaaacagagaccgtttggagttctcttggaatttattatataagaaactcatgtgttttgcagaatatttacaaggaacgggtctgggcattaattaaaggtctcagattcgcttttggccattaaactcagtagccactctgcagggctgtgtggactgcccttctcagattaggagactgtcgaatcctcgcccaaggaatgagtcctgttttaaaattgagccctttcgtttttccagttttgctcattttataaattttcaacactaagcacaattaatatacatgttcattattaaagttggaagtggctcctaagcataatggaagttgacttttgctctgtgtactacgccagcagaactctgcagtgtagtaggcaggcatcctcagctctactgaggtagctgctatcctcagttcacatgactgggtagcatctcactcccatgagttctgaataacccagaaacttcctggttctttggtcttttctttttgttatcaaattacttatcctaaataaagcaaatttaatactgactccctaggtctaagagtctgcacctctcagcattaccaagaatataaagtagaaattaaaaaaaaaaaatagtttgtggctacaaagcagtggaagtggatcctgtggcttcagaggaagctgcaggctgccacggttccctcctctgctctgtgcatcggtttactggtgaagagagccagctttgccctccgtggatcgctggtgcatcctgggtgctgtggggagactaatgagctgcaggcctgcctgcaccagcaagtcctcgagctccagacgcactctctttactctttataattaagggcctgaagccattatttcagacttcccctcctcctgccccgttgtgctcacttggctgttttatgggctatttgtgcgtactttctaagcaagcccggagtacacatgcaaaatctgtcagtttaacctctgacaggaaactattcagatttggtaaatacattttaagtgtatgcttttaccagttctaaattaatatgaaggtgttcttccttttttaagtgtaagtattatgtgcagaactatatttatgggaattggtttttagtttgcttaaacccaaagatactcattttcagcttcaagtagaaaaggcctcgtccttacggagggtgggtgttcacatttcagataaatgtgtttcaaaaaaactttgagggactttctattcctcagaactcctcagactttcatttgggactggatgaggggaggattaagttaaaatggtgaagagattaggcctgttcttctcatgtcgttttataggctggtgtttgcagccctgcaagttaaatgacaggacacccatgtggtgtcctttctgagaggagccctaaccctcctgcttcggctgagatagagtgggtggagcctagctgcttcctgttcaccgggctgtctggccccgcagtgataagcagacactcactggccacttgaaggagactttcagtaaagttcccaaacccacggccagctttctcctgtgaaccatttatttgacaggaaatgaaattggttacagggtttctcacattgccaaacctcactgacaaaatctggtttcttccagagcccaggagcagcgttaactctttgttgttagtaaacacgtctggcctctgtccatggagagccgcaacagtaccaaggggcacaggataggagtgcgcccaggggactggctcacagatgcccaaagatgacccctggagaatgggattttacttcttattggcacagtcatctctcagaataaagtgacattttcacaagactaattttttacttccaaaagtgaaagctttcaaccatgacacaaattaccgtattgtgaacagagcctggttgcttagtccagcaagcagtttttacactctgcgacgaaagtagaagaaacagaaataaataggcccatgtggttacagggcagagaaactacttgggtgagtgaaggttaagttactacaaagtgtataatctagttcatatgtttaaggaggaactaggctaaattacccaaaatattctgacgcatggaatcagttcgttttgtgaggcagaactggtggctcatagcatgccatggtaggctcgcctgctcggtgctgtctgcagctccagcctcctgggtttggagtcagcaggcccagaggtaaggcactgcatgcatgtggcagtcattaggatggtggaagtggttgctggctaattgatagcagtagcagcttgagacagccttatttaattttcaatagtcctatgacaggacgctataaatgggtcgctttgtagtctgactgactcccattgtcctctgtgtgccattaaatatgagagagttaatatatgcacttgataaaatttaggaatgagtttctctgcccctcttccctcctttggagtctttccatttgatgtttgtcctggttaccttggactccaaggtactccatagttactcccagtgtagcctgctgcccttgtctgccatggcgcctgtgagctacaaatgtgcttgtgatcacaaacccaactcctagcctgtgccagctggtggctttgctcgcgtctgagccacccaggctccacagagggtgacggagtgaatcactcccgctgtccatcactaggaggtggtaagctttgtgaacttggattgcgttagatcaccacgtccacggtttcagttgctgtctcataatgttacacaggctgaagtgggtggttaccttttctagaggatgatcttatttttctccgttccgttttaatatgtctacagcagaaggccgtatttttggaaatgaaagtgtagtcttttattaataacaggcattagaggaattcactaatggaaatgttcaaagaatgtgtctacttccttttcttatttcttataccccaccaccaccaccaccatccatgaaatagaaatgtcagtcttagcacttgtgtgcatttggcattcttcctgttgctatagatgcgaaaaataatagcaggtaggtcctaaaagctttgccttcatagctggtgatctgtgccctcgcccttgccctcaccctctcctgtccaacctctgagtgaaagaccaatgagtgctttagtcctctgtacacaccctccacagtccacatacagactctcagggatagcagtacttgaagagagagccccaaacccaggactcatggactttcagatgccaacaatgtatatatgatcgaactatggggctcctggtcatactattgatggtattcgtacagtcctctgagcccttgaatgactgtcttcaacatcaagggccagtgttcttctcttacaaagctactatttgcagtagggattttcttgcctttcatttatttgctcagctagtatggattgagcaactgctgccggctcagctaactgtatgtcttaaaggaccctctgctcaggagactccagtttctaaaggagcattcagagaaccggcttccctacccctggctctttttcacaggtgaggaatcttaagctaattgccgatggcggagtgtcaggagggctccatcagcagcaaaggaagggtacttgcagccatgctcagggtacttgcagacctgaaaccaccagcataggaaacaagagaagagaggggcaggaggatgctgagggcaaaagcaggagtcaggggcaccctagttgtgtagcctggatgagctgtgcacccctcactcccctcctgatgcactcggggtaccctttatgtgtccccagtgtgtagcaagctctgtggccagagcttttggagcttcttgcctgctggcctcacttttctagaacaaaggcaggagctagggccatagatgctcagagtcagaacagaggcggtgagcctcttcctgaagcctgacactcctcgcctaatacatggttttaacaagcttagccatctggttcccaagtccataatagattagaagccacaacttaaaagaactgctacaagttagtatgtcaacagcagtgaaaattgagggccacttgtcctcattaggcaggaaagggacagaaaacaacacatctgactgctgctttcctatgtctcttaagaacttttacaagtctgcagaggtcatgaccctgaagaacagttggggcagtcccaggccctgctgctctcttgagaaatgtaaaggcccttgttcagggcaacaagggaaggacctaagcccagaggtggctgaaggccccgctctgaccttcccagacagctccgccgcggctgagtgctctccgtgctggtgaatttgctgttgtattttggaaagaatcatagcaaaatcagcatgcttgctttaaaatatgatttcatttatagtagtttgcagtttactcaaattttcatgagcgtgttaataactctgccagaacttagttacctcatttgaactacatggcgccccatgcagacaggtaaatatttcactagtgtggtttaaagaagcctgagccggggctgtctgactttgaagatcataaccaatttattgtgcttcccccggtgtttccttactatatattctcttatcaatattttaattgaaaactcgtctgtgtagccttcctcctgatcccagtgtttttaagattcttttgttgcatattaaatgaaaagacgtccagattctatgcagatgtgttcgtgcccggtgtgcagagtggagcatggggagtcacagggatggtttggggtgtatggagtccctccttagagaggaagctggattgcccacctccttggcctcagtgtccattcctgtcggtatgcaagggctgcatgcgagttttaaatctagcgaagcagctaagtatcagcatagttcacatcattgttttgatttgtttttgtttgtttgtttttggttgtttgtttttggttggttggttggtttttcgagacagggtttcccttgtagccctggctgtcctggaactcactctgtagaccaggctggcctcaaactcagaaatccgcctgcctctgcctcccgagtgctgggattaaaggcgtgcgccaccacacccggctacttgatttgttttaacaatctcccacctccagctgcctagataggccagggatggggaagaggaaaaaaaaatgttggatctgcgacagtttcaaagaagcagtattggatggtgtcctttctccagcctcagtcagtggtctaaagcaggtcacggaggactagggcctctgctccctttgttcttaaaggactggaggggcaactcgtagttaccagggcttgttgcccttgcagaggccctgggtcgggtcccagcaccatgctgtagctctcggccacctgtcgccctcttctggccgtcacgggcagtgcgcacatattcctctcgctagcagcattagcttgagtggtaagagaagacaagtgctcttgtcctcttcagttctcttaaatataggaaaatgagaattgactggcagcagtcacacaaatccggcagggaccagtgcaggccctgacacaggattcttcaccatgtgtagtgacacccatgctctactgaacttcattgtgtcagggacacaataacatttctcagcctaaagttctttccaaagctgcttacaaagaaccgagataacccctcattactaatggcctgctccttcttcttgcaccgagagctggccggccctgtgagctctgatgaccgatactgtgatgtatgtccattcattcagactctttctctggactactctgtctctgactggcagaatatcttcccaagtgaaagagcgcccagtgccctggcattgctcctcttgctccctctgggccttggagggactacactctggggtgtggtcctgggagctcaggattctagcaccacaagtatttctgaagctgcagctgcgctgtgtacgtgtctgtggtagtgttgaactgctagccggctctctgattatgttacacttcctccttagctgcaggctgttccttacctgcccgtttgagaatcagctctgcctctaaatggggctgagggctgttacaggccagcccaaagccgcaagctctttatccactgagccgacccaagcctctttacagagcactatacaaagcttgtgatttgtctgtgaatagttgaaatggttttttttttttcagttaacatcccaatttaacaataaactaactaaaagagtagtttctaagatatctgaaatagtccagtatttcagaattgagaatgtaagccagaaatggtacttaatgcttccaattccagcactccaaaggctgaggcaggaaaatcatgagtttgaggccagcctggactgtgtggagatagggactgatagagaaggaaagattagcgggtcacgtgaggggacacagcttgcttatgtcacacaactgagtaaaaagttgaagaaaataatttgtctagacagtgttctcactgcttaaggggcaatgtttaatgatgacgtgacgaggaattactattaactagttttgtaattctccgtagaggccctggactgcagagctgtgttggaaagtaagataagctgcagtcttggttgggcattggacctgttcagggtgcagatgcattcctgcatctgtaggtccctgtgccttgtgcctgcctatgcacatggcagattccagcctctcacactactgttgctctcgagttggtttaatcccagctgaaactcagtaaccctcagaaagctggtgctacattttctcccattggtctccttgagacaatggatgggtgctgtggaaaacctaaatagggtgcatgtttcagaatggcatgtccgccatagaggtctaagtgtttcacagagtgacaggaccgttcagggtaactgaggtctccgagggggtccgcttcttgtggatggcttcgtaaaacatccttctatccccatcccttttaatgttgggcattgaaccttgaacatgctaggcaaacagctgcaccctggcgacactctgctctgaaatcagaaatgcatgtttccaatctggaatctttctaatagacctcttttataggtatggccgttgttctgattaaattttatataatttatgtaagagtctatataggcttttaaattaatttgattcttaagaaataaaataattaaaaacctggtctgtggccacttagtgtctcacttttaaaaggtagcttgtttctggatgtgattttacaggcctttaatcccaggattcaggatgcggaagcaggtggatcgctgcaggtttgaggccagcctggtctacataacaagttccaagatagccagagctacataatagaaagattctttcttggggggggtaggaggggaacagaacagcttactagcctttaatcccaggattcaggatgcggaagcaggtggatcgctgcaggtttgaggccagcctggtctacataacaagttccaagatagccagagctacataatagaaagattctttcttgggggggtaggaggggaacagaacagcttactagcctagttttatagcaattgagaatcttctagatgaaaataagaagtgtcctggcctgccacttcacagcctgtgtctggtgtgggcaattggtcagaatgtagagccgggcgtggtggcgcacgcctttaatcccagcacttgggaggcagaggcaggcgaatttctgagtttgaggccagcctggtctatagagtgagttccaggacagccagagctatacagagaaaccctgtctcgaaaaaccaaaaagaaaaagaaaagaaaaaaaagaatgtagggtacttcactatgacagtaagggagtagggtggggaggtaccaatagggaatatgagtgggagggtgtgtgggtgggtatgagtaggtgggtgggtgagtgttggggtgaatggttgtgtgtgaggggatgtaggtaggtggtgtgaatgaatgtggggtgtgagtgggtaggtataagtgtaggtgtgagtgggggtgagtgtgtgtatgtgtgtgtgcagtgtgctgcatacctgcctgttctcttctgtcacctctgtcctaacaatgggtacttgggggcaagtctccttattaggcttccacttgttctagccatgtatgctgtagaggaggatgagagccaagctcatggcagtggccaggcagggtccacacaggaagccctgagcaggattctgttgccttctttctcagatgaagcactttgtctaaatggctttcctggctcatcataaagccccactatcacttcaccctacctctaaaagtggagtcatgttttctaagctgtagcccttcatccctctgtgccacaggactcctgttttctcccacacactcgttggagcagctagggaacaggctaaaacgaagcccactagttctggtgtactatgcctcttgtccccaacatctcgaggcctctccattatctgtgaggtctgtgagtgtgctggcttcccctgggacaggagggaacgggcgccagagctccaggacaaggcatggggactaacaaggatgtcagtcagtgggtcctgaatgagaatgtcatctcggttgcagggagtctgtctgttcctaagccattgtccctattgttactgatgctaatgtttacagagctaatgaactaagattaaagtgcagaactaagaactgtattagaagaatagaggagacttcccctcagactctcttctggtgcttaaaaatggtcagaattacatttgatgagccttcagacagctttctcagtctggctccgaagccaaagccgtggtcccctggcacctcatcaggccatgaagtcagctgtacaggaccctctcccagaggtgtcttcagaaaccacatctgagagctaaggcacattattaggaccagtcccacggtggaaatgtaattctgtttatctttgctcctagtgagaaacaaagttacaaagatggacccctgaggtctgcagaggtttgcatctgcagcatccctgcctcttctcctgctctttaccttctctgttccctctgctgttcccagtcctggcccttctcctccgtggtctgcacgctcatccctcattgctcttccactagggactgttcacctccaaaccctgtggaccattttctccctcacgccttccagtcacagtccagctcacttggtgacgctgagtgtagtccaggcttggctctcttcatgctgccatccatactccacacaacaggagcccctggctgtcagtccccgtggggtctgtgtctgtgtctgttagtcctgtctgccttgtccgtccttcccctctacatatccaggccttatttacataccacccttttctgccaccttctcctcgatgcttgtttaatttctcccttcacgggcttccatgaggcctcatctccacaaccatatcctttgttgttgtgtaattgttcatttgtgtatttgttacagggcctcgtagagcctagactagcctcaaacttgctctgtaatctgagaccagccttggctcctgaacctcctgcctacctctatctcccaagtgttcccaagttacaggcacttactaccacctcatcttgcctcatcttgtaaaggttgtggctgtctcctgaccacacctgggttatccgtaccttcatggagacggagactctctcagtcctgtcacagttgtctgtcaagggctcctacattaccattgcatttcattttgagcctctttgctcacagaaccttcctaatgccctcttcctcagaactgccccacagtcactataaatacatggaggcagacatgagtgtgaaggacacaggacctggggacttcctctgtgaagaggccggtggttgccgtgaggagagaaagcgattaactctgaaaggtcacatgtagccgacctgtggagaccctcaagtacctaagaggtcacgtgtcagattaggtcacgttggagaatgctctagccatttctcctgtttgcatgtatcttagctctccaagtaaatactgtgtctttaatctgatttgcgttttggggtttttgttggtgttggtgggttttgtttgtttggtggtttgtttgattttggtttttggttttttggtgtttgagacagggtttctctgtgtagccctggctatactggaacctactctgtagaccaggctagccttgaactcagaaatctgcccgcctctgcctcccgagtgctgggattaaaggtgtgcgatgccaccagactccgccttgtctcacagctttaacgaatgattttatggtacaaagggtcaccctgggatttaattaacctcacctgtttgataatattcagatttatgtcgagaattggcactagagcaattcaaaaggaagacgttggggtagatggaaaaagagtggcaggaacaggcactggctgggctctcctctccgtactgtcatttggagggtggggcctatggtcattctgtatgtccatatgtcccctcccccacagagcagcaaagggcagtgtatctgcgtcttcacctctcactgcccctgagctctgaccagagcacagccagcaagacagccaaggactggccatttgatgataaagacccatcagccagatatatagatacagatagatattataattaataaaaagaagaaaagatcaatgggtcagcttttgtcttgctcaggctactaagcaaaatactagaaactgaatgattgcttataaacaacaaaaccttaagtccaagacaaaggcactgcggggtccggttctctccctccggggtgtggaaggagagagctagctctgtagggtctccttcactaggtcactaatcccactctagatccctcgacctcatcccctgcagagaccgcactctgaaatgccatcaccccgcgattcactgtgcaaacgggttggacacagactctcagaccctggccctgcaggggaaatctcctgactttatcttacagcagctttctttaacagagaggactttccatgctcgggagactcagaggacttgtagatgtatccacagggtaaactgctcccagataagcccagggccctcttctttcatctgactctctggaaaatcgaggcctcagctcacgctagtgcacctcactgctgggcagatgctggctctcagggcacttgacagcttgcaccttggttttcagtttttgttgagggcagggtgtttggttgggttgagtggttctttgtttctttctttctttaaatttaaacaacagaatcttgattttttttttaagtaatgtgtattctgcatttcttactctaaataaattcaaataaaagaatcttttatagtttgcttcctagatcccgtttctaaaatatagtaagttaatggtttaaattcagaatttcctttttgaaaggacctttaagatgttttgtgataactttcaaggtaaattccaattttgtttaatttccatgctcgcagtgtagaagcaattgaattacccacggttgttccctgagcatagaggaggagataagcactccgtccgtctgtattgacagatgtgaacgtcgagcaactgaagccttgctgtaaaccgtgacttgcttgggcttcagccaccgccgagctctggaaatgagtgctggccctcgcgtgcacgctcgctgtctgcaggtgctccgcttgccttctgggatgttggtttaaaataaataatggtagagcccaaaacaggagagcgctctctgctttccagttgtccatcctcgaaggcagagcatggctccttggcaccttctgcagcattgtgtcgcgaggcagggcaaggtctgagtctagccagcacagcctgcctgcaggaaccactccagtgtcctggccagtctccagcctcattctctccactgcttagagcaggccccagcaactataatcatttgcagatgaggtaactctgtcaaggaggtgatactgtgtgtctgactgttactgtccgcctgctagaaaactctcacggcatgatttctccaccgtccacagcctcgatagcagaggtgctgtgatctctctgtcgtccacagcctccatggcagaggtgctggtcatgataaaagattgtgcttccccatagtgcatttacttctattccaaataactgccaggcgtggtggcgcacacctttagtcccagcacttgggaggcagaggcaggcggatttctgagtttgaggccagcctggtctacagagtgagttccaggacagccagggctacacagagaaaccctgtctcaaacaaacaaacaaacaactggcaaacatgacagctgacacgagagccctcagtgccagcgacctgactttcgctgctcccagtctatctcagctgggaatgtgaaacagagaagacgtttgttctgcctggcacaacttcagctttcccgtgctggatggcacatcgcagtgtcatgcaagcccctcaaacctcacctccatgatgtcctcatgctgcagagccaccacgtaggatggtaaaaaccctggggtctgtggctccttgcctggttcctcctggctcccatcctgcagctctgcccacagactgtgaccctatggtgacctatgcgacccgtcggccagtatctgagcagtcagtggaaggaaggctggacccagaaaccagccttcctcacagcatgcagctgcctctcctctgcatcgtgtgccagctgagtgccaccaaaaacatgttcttctatgaaactgccttccctcttgttctcattcataaaaccataagatgtgaaagtaccttaatccctttgttaacgattagaggttgtgtggatctgcacccgcacagttaagtctctgactcgctcagaccccagtctgaacccctggttttagctccgatggcagtctttacgctgttagtccacagagggatggtacctaatgcccaggaaagccaagagtgcaggccgacacagaattgtctacacttgagcattgtccgctttttctaaaatttgatttgtagttctccagcttgacagcgtcgtgtcacagtatcaaaaaggttggacacacctggctctgcccttggcccaggaaaggataaagcgggaattgtgaatgggaagcagcaggctttatagatggagagtcaggctttggttccccttaggggcactgctacttctgctgctgctgggcttctgcaaggacagtctttgacggcatccgtctgatgtctgggtcatatttgatctgcgatggcatctcctgcctgtgtttatgatcctgtctctaaatttgttttgaaagcacagtcaacaatattaacaatgtgacgatgctaacggtctcttccgctgttccgtggggatgctggggtaaagaagtctaaagtgcctctgctgctccctgggtccttgtgtgactgctttgtttcagggagataggaacagaggtgacagctaaagagatggatgtgactcgtcagcatgcttagggaaaccccggagagaatgttaaatggatcccccagccttgctgtctgccttgcccaatctgtggttcacaacaccaacttctgagatttactggtcctcatggctttgaaaatgtaagaaagtcacatgatgtgctttgaatttagagatgatttgtgttagatgatcatgtgtcacaggcagggacaccacgtggacctcactctggtcgctgggaaatatgtttaggggaagcacagaggtgagggtcctccctcctttgagccatgaaatgtcagaactatgcatggtggctcatccatctaattctagttctaaggaggctaagacaggaggattgccacaagttcaaggctaccctgagctacaacacactgagtttcagaccagtctaggctacagagtgagacctatctcagaagcctaaccatctatctccccacctccaaaattgtgggttagtgacagagcttggctggcagtcacacacacatccaaaagtggggtttcagtgtgatcttcgtcctgtgtattgaagaaggcgtcaccggcttagcatccggaagctttccgcatactgtgagcagaggagagtcccctgctgggatgggcactgaggtacgctgggtgcttcttgctaaagaacaaccaagatcagattgctaacagcgaggaggctccttcgggcactcagagactgtcagatttgcttaggacttaaacccaagaatgttcagagaagctagctcctaagagagagcagacagcgtcttatctgaccgtcttagctggaattccctttccaagtacctcttcaatgcacgtggcaaaggctgccttcccacctgataacagccccctgcctctgcacagcccttaacacatctcaaatgtgacaaagttccttatttttcatgagtttatctaaatatgaatcagaacccgcttctaattcttcattccacaatttagtctagaaaaattagcataaagacatgattgcagctaagcagttcgagcttacatttgaggccctgtgtcaccttcttttacccacactgcaacctgaacacgaatccaagaactactgagaatgggattcctcattctacacgcgtgcttcacccgttcttccccccgagcttcataaccggtgcagttgtaaaacatttggtgtggttttccatagtgagacccatgtgaagtacagcattgcacgtccatactgtggcctattgtctgaggggagggtcttctccttagtgccccgggcttcataggctcatttggtcccagatgactctgggccactgccccacaattcacccagtattcaggagcctttccaaactttcttctttaatcttagtaagttactgtatttcgtgggtctgagtattttgcccacgtgtgtgtctgagcgctgcttgtgcccatggaggctggaagaagatatcagatcccttggaactggagttacagatgattgtgagcagccacagggatggtggaaccgaacctgggtcctctgcaagagcattccgtgctcttaaccgccgagccatctccagcctttctgtgtgactctctgacttgttcactagtaagttagtcgtttgctcactaagcctctggccgtgctcttaggtacttgcatctgttgggtgtgtggacgcctggcgttctttctagtcagaccacgctcacttcctgcacgtctcccatcccttccatccaagcgtctggctccttcctgtgataagcacccctcagaaggcaaggtacaccatggttgttcctgggctgcctctgggccagcttggagcacatgtgttgcagaaaattctgtgctgtgtccctcctctaaagtgttctccctgcaggctccggaactggaataccatggacatacctcgctcctgggagccattgtgagcctgtggtagcgagctgtccccgacctgctccacaccaggctctcggggccgcccgtgcagctgctttgctgcctcatctctagctgctggccactcagtgccaggcagtcccactctctgccctgcagtcacggggcccacccttcttcctgttccaggcacccatagcacccagaaatgaggcattcaaactgaggacaaaggaaagcctctctccttcccttgcgcctctgttttagagaaggtcccagcggggacactttctcagccttcaaccattgagcctcaagttctggctgaaggaggtaaaaacagtacgccgtgtacatgtctgaaaatgtcataagccattactcaatggaatattaaaaaccagtataataaatgcatttctaaaaatgacagtaatatcaacaaataataacaataacagtgattttccggccagtgtgggagtgccagcgatagatgcttcactcttcctgagagccagagaccctttgaggaaagctgagaagctcactgtagacactcatgtggtagaaccattcctgagctgcacgtgatctgagctccgagggctgtgcctgctagcttgcccccagggagctccagttggtccctgcacagccagcaactgtatcccttcatgggcatgcggtatagtgtggccttcagagccatccaattatgggtatcatagttttagctctgcgtacttttttttttttacttaggtatgctgtggaagtttggatgggaatgggtcccgtaggcttgtgtgtttgaatatttggtccccacctggtagagttgtttgggaagatttaggatgtctgggcttgctagaggaggtgtgacactggggtgggctctgaagtgtcaagactcctgtccatcccagcatgctcactgccttctgctttctgggggagatgtgagcgctccactgttcctactgccatgtctttgctctgccatcacagaccctaaccttttggaaccccagtccctagtaaatgcctcctttaatgagctgccttgctgcagtcacagggttttatcacagcaacagaaaagtaacaaaggcagtgtctctctgtatagcccaggatatcctagaactcactcaaacacgtgacccttgtgcctcacttatccaagagctaaaacgacaagtatttgaggctagcctgaaaaacatagtgagatcccattgctattccaaaaataaaagtagaggcaggagagatggctcagtggttaagagcactggctactcttacagaggacccaagtgtgattccccactcacatggcagctcatcaccatttttacctacattccaggggactcgacaccctcttctggtctctaaaagcatcaggcacgctcatggtgcacatgcgtgcatgagtgcatgcaaaacaccattatacacaagatgaataagtactttaagtaaacaggaattcatgagaaatggaagcttttccctcctcgcccaccgctgctcagtggctctgtgtctgtccccttcctgctggtggctgcatctttacacatctgcagttcctttggtctttcatctgcccagcaaagagtcagacggactgatggcatcggggcctccacttgcattggttcactgttctcccatctgcccggcctaactcctctgctccctggcacccgtgactcctgctgaagtccacgcaggtctgcacggaacagcaggtcctctttccactgcagccctagatgcaggacccaggtgtccgttttttagtgacagtcaggtagagaagggggaaaggtacgaccagatggcctcacgtaggggggtgacaggaggctatagagctcccgcatcctgtaatgcaaccatggacttcacaaggaacacttttctttgctgtcctgtaacaggctcatgaggccactttcgactgcctgaccaggctgccccccataaacgagccctgtgaacgagcttgctactcagtccaaggctccacagctgccagcctgttttggctgccttgggcccagtggccaccgtctacttgtctaccccacttaccatgtgcaggaaactcttttccgtgggccgcatagccgtttgattgtaaattgcattaacttcctggagccttgccagccgcttgctgggtgtctgatgctatctgtatagactttaggtggaaactggaaatctcactgaacttctgtggtaataaaattattacagttgtaccctacatctgttcactgacttcctgtgggttttcaccggatcacatgactgacaacagagacaggctgtatgtagtaggccctgggtgtgccagctctatccaagtctcaacgccacctcagacttatgctgtgtcgctgagtcgagcgtccgggtgtcccactgtggtaggttgatttcactggagctgataaaaaaaaaaagttccggcccactcgagagtctaacgtttcctctggctccaaaatttaaaacaacgggattgttgtaagtggttttggacaaagaccaagctccaagcttcggagatgggttttctccagtttcaaaaccaagccacgggccaaggatcttgaagagaggtgtgaaagccagggctcctacctggcagtccccttatgcctctccagcacccctcaggccacagtaacccaaaagtccctggtaggagccacagcagaggcctgagaagggctagagaagcaaagtacgggggcagaaagtgaagcactgggctgacatcagcgctgggactcgcccacagctggcccgcagctgcctcgtagcctggcgtgtcagggatggggacgccccccgctgaggaagctggatgtcctcagccacacaggatgacattagtgttcttcatgggcttgcacagggaagggtgactctttctggtttgttaatgttaccttcagacatgacattttgtggactgcatcccgacaaaatatgtccccggtgtctttagctctaaacaaaaccttttgtcttccctttccttggctcttgagcattctaagatgtctcggagaagcacatggtcttaaggatatctgttcaaggctctatagctaaccagacagacaggttgtggtgatggggaagcagggcatggaaagtgtggtgcaggcccagctcaggtagctgctacaggcgcatccggctgctggatagcctgtttatgcctgttacctgctgtacaggagtcctcagtcagccaggcttgcaaatagctcgtcccaggagaaggggcgtcacctgggctttcaattgtctgcctcatgccaccagtctggaaaataggtctatgtttaccttgctatttgtgccaccgtcctttatgaaccatgaagtgacctgctgctggtaaagattccagaaagaacccagaaaataatagctcacagttcagttattcacccaaggagaaagatgacagacagacagtgggcaggtgctatgatgtggtctcagagccatgtgtgctgtgtctagcagacttttctccagcagtgacaatgtttacgttgctgtgttattgtctctgccttctacttccctgtgactcatggtgcacacccaatagactacaacttgcaaacactgtctgtagaatgatcaaatcttcaccagacagcaggcaggacctaaaccctgtaggccacttagccataagttcccagcccacagagctacttaacaacagcttgcttggtcttggacagttagaattgccttgaagagcatcagttgaatcccaggatagtgagtgacacaaggaacataggtatctgccatgaaggctaactgcatgaagcctgtgcctgcttgactttaaagttacagtggggtcagccagcaaggcagggaatggaagggtttagatcccccactcgagtcatctgacagatgtcagaactgagaggagtacataagtcctgcattgtacacaagctgagaaaccaaagtcccaggaaaataccctaaagtgcccagcttgctttcctggccccaacctgggctggcagagggcagcccgtgcatgtcacagtgagacacccaggcaccacagttgaatgagaccattgaagagcatctctttaaaggcctgggaacctcatacccacctagctgtggatgtttggaggacggactccccaatccttggtttgagaggctgcagtggaagagtcctatcttctgctggcccgtggcctctgtagcaggttactcaacttctccactctctttctgtacagtactttgtttaaggcctgacacaagattattgtgtgatatgaagtcctttgttcattccattcagcaaataagtgtccataccatgccagatgctcaaaaactaaggtttctggtttccgaaagcccgtgatatgtttacgtgtgaaataattcaaaaacaggatccgccccaacgtaccagtgagagctgagaagacagtaaacctgcgggctagggcagccacgttagtcttcagtaaggtgctcataggacaggtgcatgggagtgggtgtgtggttgtgggtgtgtctgtgcatctgtatttgtgtgcctctgtgggtctgtgtgtgcatgtgtgcacacatgcctgtgtaagtgactttggtcaatgtcacatcccctctcttgggctgttcctgcggctccccccttggtccagccccatctgtccagttccatgcagctcagagatcgtgttgtttcccatcccagctccttcttggatgtcactggaggtgtcataatcttgtgaatacctgtgctgtggtcctaatttcacatacatggtagggatggcccctgtcgaattactgtaactgtaaacctgcctcagggttactctcccttcccactagccagcttctgatgaaaggccaaggccgttctccagacccatctcctcccagtgaccaggctttgttccttagagatgtccgtggcctgagcctggtgtagagagccgttgctcagtacctcttcctagcttccatgcagagaggccaggtccccacctcggcgaggagcataggagaaacagactcgcatccatcccagtaccccggtctcttctttggtcgttgtactaccagtaacagccagcatttgctggctgcctgctctgtgttagacattctgcaaggcctttctgtcatcatatggcttcactcatttgagcgctcagctgcgacagtcagacagttaaatgcaaaacctcagaggatagtgccaaactgtgttccgagagcctgaggctgagcaggaacgggacttaaagagtcacaaccaatgaaggcggacttctgctccgaaactgtgggtctgggcactcctcagccacagccatattacacactgggaaatatctgtaaagggagggaggagggaagaagaaaggagaggcgaggagaggaggggagggcttaaatgatgccttctgaatagtttttcttgttgcttcagagattaaatgattgtctcaaaacactttaatatgcctgttaatgtaatcaattatgttagctagaaactggcttgccgtagtctcagaattgctaaagtgtgttgagtggcctttaacttggtagccctagccagcctggggctcactatatagaccaggatggtctggaacacacagagatcctcctgcctctgcctctgcctctgcctctgcctctgcctctgcctctgcctctgcctctgcctctgcctctgcctctgcctctgcctctgcctctgcctctgcctctgcctctgcctctgcctctgcctctgcctctgcctctgcctctgcctctgcctctgcctctgcctctgcctctgcctctgcctctgcctctgcctctgcctctgcctctgcctctgcctctgcctctgcctctgcctctgcctctgcctctgcctctgcctctgcctctgcctctgcctctgcctctgcctctgcctctgcctctgcctctgcctctgcctctgcctctgcctctgcctctgcctctgcctctgcctctgcctctgcctctgcctctgcctctgcctctgcctctgcctctgcctctgcctnnnnnnnnnnnnnnnnnnnnctgcaataacaattgtccacttgaatagtaacttcattataaaatctgcccatgtccgccattgacagcttgtccacatgagcaccgtagtgttttatgcactggccattaagggacgcccctggcggtgagacggtacacaatacgtgggagctttgtctgtttattgctgaatagtttacttcggatgagacggacagtccccaccttgtacctttgtacagggtgagatgggttccggtttataacttttggtgtgacagtccacccagggaagctggctgcttttcccacttccacagcctccagacttcaggactctctacctcgagcccttccatcagaacagtcacaggaatgtcccttcccttccctgtgagcactgtgagggtgggtgacagccaatagcttagcttcctctggacagcttagctgtgtgagcagtcccaacctcctcagacacagacagtgggctcacagaggtcctctcatgtcccttcaagaccctgtcaggaaacctttcccccacgtgtcactgtatggagaagaggccccacccccttgagtcacttggtttgtttgttttgtttttagacaaggtctctccctctctctctgtagccctggttgaccttagaacccacagagatctgcctgcctctacctcctaagtgctagaattataggtgtgtgccaccatgtggtttttaattctaacaacaaaggcccgtgctgcctaatggtttcattgccacagggaagtgcagggcactgtaaggagaactgatcctcggtggtacctcagagaactgcagctgactgaccactgtagcagaatgcctaaaacccgggcgctcccttcaaacccacctcgcccagtcagtcaggtggggacgttcagcctcactctatccaacaggctctgtgtccttgaggcgtgcacagagcctgctgaccctgggtgacccttccgttaggagggtgactcggtctcagcaggcagttgtgctgagttgccctgtcctaaggctgtgccaggagcagtggttggatggtgtgtgaggacggctgctcagtgaggaccactgctcggtggtggctcctggcagtgccctgttgctatagatctcattttccagatggccaccacaatagttggttcttgtccacactcacatgacactcggtgccaaacagtgaggagccactttcacttcagcacagcctgtagaacccactgcctggggtgtgtgccattgtcctctaagaacgttctgaattttcacaatgtaactcagagctccccaagccacaaaataatctaatgctgcttaactctgtccctcttcagtcattcagaaacctgggggtctggggcatgggtgttttcagtctgcattgttcgttctgtctcatacacacacattgtaggggtgtgtgtgtgtgtgtgtgtgtgtgtgtgtgtgtgtgtnnnnnnnnnnnnnnnnnnnnnnnnnnnnnnnnnnnnnnnnnnnnnnnnnnnnnnnnnnnnnnnnnnnnnnnnnnnnnnnnnnnnnnnnnnnnnnnnnnnnnnnnnnnnnnnnnnnnnnnnnnnnnnnnnnnnnnnnnnnnnnnnnnnnnnnnnnnnnnnnnnnnnnnnnnnnnnnnnnnnnnnnnnnnnnnnnnnnnnnnnnnnnnnnnnnnnnnnnnnnnnnnnnnnnnnnnnnnnnnnnnnnnnnnnnnnnnnnnnnnnnnnnnnnnnnnnnnnnnnnnnnnnnnnnnnnnnnnnnnnnnnnnnnnnnnnnnnnnnnnnnnnnnnnnnnnnnnnnnnnnnnnnnnnnnnnnnnnnnnnnnnnnnnnnnnnnnnnnnnnnnnnnnnnnnnnnnnnnnnnnnnnnnnnnnnnnnnnnnnnnnnnnnnnnnnnnnnnnnnnnnnnnnnnnnnnnnnnnnnnnnnnnnnnnnnnnnnnnnnnnnnnnnnnnnnnnnnnnnnnnnnnnnnnnnnnnnnnnnnnnnnnnnnnnnnnnnnnnnnnnnnnnnnnnnnnnnnnnnnnnnnnnnnnnnnnnnnnnnnnnnnnnnnnnnnnnnnnnnnnnnnnnnnnnnnnnnnnnnnnnnnnnnnnnnnnnnnnnnnnnnnnnnnnnnnnnnnnnnnnnnnnnnnnnnnnnnnnnnnnnnnnnnnnnnnnnnnnnnnnnnnnnnnnnnnnnnnnnnnnnnnnnnnnnnnnnnnnnnnnnnnnnnnnnnnnnnnnnnnnnnnnnnnnnnnnnnnnnnnnnnnnnnnnnnnnnnnnnnnnnnnnnnnnnnnnnnnnnnnnnnnnnnnnnnnnnnnnnnnnnnnnnnnnnnnnnnnnnnnnnnnnnnnnnnnnnnnnnnnnnnnnnnnnnnnnnnnnnnnnnnnnnnnnnnnnnnnnnnnnnnnnnnnnnnnnnnnnnnnnnnnnnnnnnnnnnnnnnnnnnnnnnnnnnnnnnnnnnnnnnnnnnnnnnnnnnnnnnnnnnnnnnnnnnnnnnnnnnnnnnnnnnnnnnnnnnnnnnnnnnnnnnnnnnnnnnnnnnnnnnnnnnnnnnnnnnnnnnnnnnnnnnnnnnnnnnnnnnnnnnnnnnnnnnnnnnnnnnnnnnnnnnnnnnnnnnnnnnnnnnnnnnnnnnnnnnnnnnnnnnnnnnnnnnnnnnnnnnnnnnnnnnnnnnnnnnnnnnnnnnnnnnnnnnnnnnnnnnnnnnnnnnnnnnnnnnnnnnnnnnnnnnnnnnnnnnnnnnnnnnnnnnnnnnnnnnnnnnnnnnnnnnnnnnnnnnnnnnnnnnnnnnnnnnnnnnnnnnnnnnnnnnnnnnnnnnnnnnnnnnnnnnnnnnnnnnnnnnnnnnnnnnnnnnnnnnnnnnnnnnnnnnnnnnnnnnnnnnnnnnnnnnnnnnnnnnnnnnnnnnnnnnnnnnnnnnnnnnnnnnnnnnnnnnnnnnnnnnnnnnnnnnnnnnnnnnnnnnnnnnnnnnnnnnnnnnnnnnnnnnnnnnnnnnnnnnnnnnnnnnnnnnnnnnnnnnnnnnnnnnnnnnnnnnnnnnnnnnnnnnnnnnnnnnnnnnnnnnnnnnnnnnnnnnnnnnnnnnnnnnnnnnnnnnnnnnnnnnnnnnnnnnnnnnnnnnnnnnnnnnnnnnnnnnnnnnnnnnnnnnnnnnnnnnnnnnnnnnnnnnnnnnnnnnnnnnnnnnnnnnnnnnnnnnnnnnnnnnnnnnnnnnnnnnnnnnnnnnnnnnnnnnnnnnnnnnnnnnnnnnnnnnnnnnnnnnnnnnnnnnnnnnnnnnnnnnnnnnnnnnnnnnnnnnnnnnnnnnnnnnnnnnnnnnnnnnnnnnnnnnnnnnnnnnnnnnnnnnnnnnnnnnnnnnnnnnnnnnnnnnnnnnnnnnnnnnnnnnnnnnnnnnnnnnnnnnnnnnnnnnnnnnnnnnnnnnnnnnnnnnnnnnnnnnnnnnnnnnnnnnnnnnnnnnnncttgtctacccagatctccctttcctacactgaggaatctcccagctcgtgatattttatttcagcccgaagtttccacctcactaggaaaccatggagctcagtcccccacaccgagatggagaactgaacttcttgttgacccctcttcagacccttccaagactccaagaccttactgcagagtgcagggacctttggtgtcccaggcccagacactgcttactggtgtggacactccctgctgccttgtgacccatcagcacagcatccgtgggactcttgtctaggacgcgcttcctactccgtctggccacgccacctcggcaggccctgcgtgtctccccctccccagcccttgggtggagagttcattgttgtccccactgccacttgtctctccttccaagaacttggacttcccgtgccaacaggaactgctacacccctaggccccagcccacacaggcctcctggcaccaagcagccaacactggagtaaacaaatgtgctctgtgataagcttgagggagaaggggagctctcctgtctgtctgtgagtctagggcatgctcagtgctcagtgcgtggagattaactcactgacacagtgagctttgaacacctcctggtactctgggatgtggctacagcaagcactggtctctgagcctgagcaccggggatgctatgggtgggtgtggcccgggtgcgagtggataccttgttacctcctctttctggcctcgcttcagccttccacctacatcctaggaccctggcttgttctcccaatgctgcctgcaacagagattagcacatggaacctccctggggggaaaaagcaaaaggctttcagtagaccccagctgttcctcaggctgcaggggaagttgcctctgtcccaggtagattagaaggtcaggaataacattagagctagaagctaaatcctggtgctgtggtacaatggcaagtgctccctccggccactgcctgcctgctcagaagcaatggagaatgctccagggccccaggggatgtacagaaccagccctgagcttcccacagccctaagaggaagaactcagccgcgtagtccccagtaggatgaggacaaggccagccagagccagctgcttcctagccatgagtgcgtgcctccctcttcagttcatggctcaggactttctataagtaaataaatatcccttcattgttgacagtttatcacacagctggattgacagagccactcaaacaagcacttgcccacgcccagagtctacacgtctcagagaactttatacagtctgaagaaggttaagagtgtttgagggaagattctcacctctaagataacccacttctcaagacagaatctcccaagaagagccaggccttgaccctgaacaggaaagagggtgtttaccttgtctgccacccagcagagacccacctccttttaccaaccctcctttaggaccctcctccgcaaaccagccaaggtcacatcatcttagttactattgctgcgatgaaacaccatggcccaagcaacttggtgaggacagggtttgtttcactcacagttccatacaacagttgaggacaggaactcaaaagacagagcaggaacctggcggcaggagctgatgctgaagccgtggaggaggatgctgactgacttgctccccatggctcgctcagcctgctttcttacagaacccaggaccaccagcccagggatggcaccacccataatggactgggccctcctccatcagtcactaattaagaacatcctaaaccgggcgtggtggcgcacgcctttgatcccagcacttgggaggcagaggcaggcggatttctgagttggaggccagcctggtctacaaagtgagttccaggacagccagggctacagagaaaccctgtctcaaaacaaacaaacaacaacaacaacaaaaaaaacaaaaaaacaaaaaaaaactaagaaaattctctacaggcttgcctacagcctggtcttagggagacattttcttagttgcgatttcctctcagatgactttagcttatgtcaagttgacataaaaccagccagcacagcaggtaagttatattttcccagcccagaagccatttgactggcagaatctgtgaaaggcctgtattcccagcctgcaagcacttaggggagggccttgctgtacaccccccactgcttgtgcttgtacatgaaagtcatcttgttctcattgcagaagtttccagaactgaagttcaaatacgtggaggaagagcagcctgaggagttcttcatcccgtacgtctggtccctggtctacaactcagcggtcggcttgtactggaacccgcaggacatccagctgtttgccatggactcggactgaagcaggacacagccacgcccaccccagccacgcccaggagcagaggcagacagactgcggcaccacagagggtcaaacaagcgtgcttccctcacacactgtgactattgggagactgcgccagttagcagtagttcactcagccttgattgtactgcaagggcgagacaaaaataaacgggaaacgtgctgttcaacatgtgacttatttttaaacttctaaaccccaaacctagagctgtcccaaaacactggggccttaggcacataacaaacgtatcaacagctcacaccatttccccttttataaaatttgttattgtttttagatttatttttattctatgtgtatgaggttttgcctatatttatatatgtgcaccatgtacaggcctggtgcccacagaagtcagagagggtgtcagacaggaactggagtgacagttataagctgccctgtggggtctgggaacagaacctagttcctctgagaacaacaggtgctcataacatgcccgctgagccggctccacagcactgcttctcttcttgagacatgttctcccactgtagcccttgccgaactgaaattcactaaggagcctaggctggcctagaacccacagcaatccttctgtctcagcctcctctgagtgcagggatcacaggtttgagccaccacacccagcctacacatcttttttttttagttctctaatattgaaaatgtttgtttcagcttgtacaacttctctcatgtgtctgtgtgcatgaacgcatgtatgtgcatgtatatgtgtatgcatgtgtgcacgtacatgcatgtgtgtatatgtgcatgtatgtgtttccatgcctctctgcagcacaagatttcataagcactgtacctgccatgattcggaccttccccagagaggttaaatagttcttttcttggaggattcacctctgagctgtaacaggaattctgtcagagtcaagcaaaattaagtttatctagttggtatcactcattggggaaagcttaatttggaaggcaacctttttccttcaaccaagccaatcggatgaacaataggagagccacttactgagacagtattccatgtgagatgaaaaatacttgtttctccttgtttctgactttgaaaaatgtttgggaccacgaatttggtcccacacacccaaggctgtgtagagtggaccatgtgtctgtactccaagcgccaaggttccgtggctgtgtgtgccaggttgcagtgtgtcagtctctgctcactccgttggtctcttaggagcagcctttccatctgtccccacccccctggctgagggcagagccctcatggtctgtaactcatgcacaccccatggctggtttcccctcagtgagctgggctgagccttccttccccggttttcagtcccttatccttttctggagaagatgaaattggagccttctctggtgtggtggtgcaggggccagggcagccatccccctgctgcctccgaatactagttcccaggaatggctgggatgctcacgctacaactcacttgtgatcacaaggacagggcttctcccctacctccggcactgacttcccagtccagctttgagaggaaggcatctggaggtggaatggcctagtccgcctttgaggcagtgacgatgtgtgtttcctacctagagaaatgattgactgctttcgtttgttttcagtgcgttctaatttgcttctttttcctgtaggcaaaacaaaacaaagcaaaaaaaaaaaaaaaaaaaaaaacctgtctcatgtgaaataactaagtacttctttggtaggctagggactaagcaggagcatgagacagcaggtttttttttggtttttttgttttgttttgttttgttttgaaaactcttgtttatttacaaaaatagataatgcatatgtaagggacccacagtccccttcacttgtacccatccaccccctttatacacaaaggctccttggtccaaaggcagagttctgattgactgggcaggagcagcaccaatagcctacatttcgtaggctgaggaaaggcccagggagttgactgtagctctgtccttgctaatggaggcaggcagagggctggagcatcttttcagtggatgctcagtccttaaaaccttgaatactgcagagaattcgtttctggtgccctggcaacgttattcccatctgcgtcaggtcctcagccgtcatctccagcacacactccatggtgtccggtccagcccagccgaagggaagtgcaggatgtagcgcttcatgcgtatggattcaagccactcagagacacttcgataagggatccatcccatcagagccgctcagactgggcaggcgtaaggtcaccctagggtcaaagtttctttaacatgaattacagtccctgcagcccatcgctatgatggaacacggtgcctacaaagactctgccccagcttcctggctccacgtgccctgtgcccccgccccggtgcttgcctgctactgacactctctgctagctcatgggctcggtggcctaagagttccacccgggcgccactagacagaggttcccagttgtgctatggcctgcctcagctctgcagtcactgggtctctttctatcccttagcgaaggacaggtccatcacatggcaagagacttaaatgataaggtgggttgagcttgaattcaaatatcagtttgtttagaactgtcaagatttaagaaggcgtctggctgaagaaatggctcagctgttaaaagtacttactcctgcagtggaccagggttcagttcctggcacctacaatcgtctgctacccagttgcaggatctaagatcctcttctgacttctgtgggtaccaggcatgcttgtggtgcacatatacacacagaagacacgtgtgtgtgtgtgtgtgtgtgtgtgtgtgtaatcatgcaaggttagcctgtgttcgtgaaaaggtaaaaattgacctgattttacttatgatcttttcctgagataaacaatgattgcagccagcatggttgtgcatatccttaatcccaggacccaggagacaaaggcaaatggatctctgttagttcaagactggactgggctacgtggcgagatgctgtctccgctcagagccaggtgcaggggagaactgtcattgtgtggagtcactgcacaccgtacagagagttccaagaaagctgggggccagggctacacagaatgactctgtctcaaaaatagcaaaaaataaaaagactccacacacccacccacccacccaaagcaaggaagattcgccagcagctcatctccctgaacccgaactgacgttacatcaccatgtgagtactcagagacaaggtccaagttagtaaacagcctgtcaccgtctactgtgcactgctgtccttgggaggcccaacatgggccatgtgtaaaacaagaactgagtctgaagaaacggctcgtggtgaaaagccgctgctgctgacccaagttcagttcccatcacccacatgatggttcacagccatctataattctaggacatggagatcctataccctcttctgacctcacgtgttgcatatacatacatgaagataaaacacacaaagtaaaacctttaaaaaaaaaaaaaaaagaaccactgagcaggaagtgctgagggtgccatgtccctgtgccccggggcaggtggcaatcactatcccgttggctctaagatgcccctgggcgctttttgtaagtatttgttaagatttttaagttactggacacatggtttggtttacctactcttccattgctatctataaactaaacctcatggagtagctggcttgctaaaccatatgaggctgatgaggaccaaagaacccagttgcctatatccccagctaccaagcccatgaaggaaacaaccataacccttgacttgaagttcatcctacacagcacaacccgaaggaactgtctccagagaccaggccaaatgaatcactgggattaaaaaacagtagtacccagaagagacccaagtctatcagacacagagagcagctgtgatcactgggtccaaaacgcacattcacttggcctgagagatggcccagtggttgtgagtgtttacagctctagcagagggctcaagttcccagcgcccacactgggctgctcacagcagcctaggtctagctccagggaatctgtctcttgtttctatagctatagccccaagtgatgtgcatacacctctgtcacacacacacacatgtgcgtgcgcgcacaccataaatttacaaaagaaaaaaagaaagaaccatttttaaaacccagatgtattgccaagagtctgagcagagcattgtgggtaaaaaaaaaaattagaagttgtagaattttgagaataattcactagacgtgtttaagaacagattagacataactcaagaacagattgtaaagcaaattgggagggctgaaacaggtgaagccataaaagaaactggagacattttgaatggagagagaaaaaaatcgtacaactaacagataggggctggagaaatgaacccatggctaaaagcactggctgctcttccagaggacacaggttcaattcccagcacttacatggtggctctcagctgtcattaactccagtttcagagtgcccaatgccttcagtcttttttttggggggggggggatttatttattttatgtatgtgagtacactgtagctgtatagatggttggagccatcatgtggttgctgggacttggacctttggaagagcagtcagtgctcttaaccgctgagccatcttgccagccggcccttagtcttctgatctgcacaaagggcactcacatacgtgcagacaaaacactcaaacgcctagtcaaaataaatcatttttttccttaaaagagggctagagagatgactctggttaggagcacttattctacagggcatgatgatgcacacctttaatctcagcactcaggaggcagaggtaggtggatctctgtgagttcaaggccagcctggtctacaaagcaagttccaggacagccagggttgtcttgcagggagagagaacgctacttcatctccgaacatccacatggtgtctcataacgatctgtaaccccagttctaagtggccagtgtcctcttctgacctctatgagcagcaaggacatatgtggtgcagacaggcagagcacacgaacacaaaagaagccttaaaataaataaaaactattagaggccacaagatagtgatcagctgcctagagctcatgaaaggccatcacgaccaccatataaagccagctgtggacaagagcctgtaattccgtacccaagaggttaagatcagaggagaagttcaaagccatcctcaggtaaatagcaggtctgaagccaccatgggtcacatgagaccctgccccgccccccaaatttaaattaaaaacaaaaacagacaaaaaaaaaatgaagacaatcacgtagggtgcagctaaaattgtatttggaaatgtgtgttgctaaatgcatattagagaagagcaaagggcgaacatcagttatttaagcagctgcctctctcactgtgagttcaaggccagcctggtctccatagtaaataaattcaaggacggccaaactacatagagagactcagttctggggagtgggagggtggggagggaggaaggaagaaaggagaagggagggagggaagaaggaagggagggggagggagagaaaggaannnnnnnnnnnnnnnnnnnntgggaccaaagtggaaccttgttgtaaggactgaggctcgctgatcccctaacaagatccatcagagtagggaaggatgagcatgatggaggagggagagctatgactgggtgtcagaaagcaggagggatgcaagttcagagccagcctgggattcatagtgagacctcctctcaaaaagaaaagtagcataaatttacgcatgttttagaggccacacttaaaccccagcactctaatacactcccaatggaaacatatggtcttgatcatggtggtgggcatacgcatataccaaacacaatcacatacatgttacacgtgttacatatgtgtggtgtttgcaggtcacacatgcatcaggagagcagtgtttagattttgaacaaaatgaacaaactccttattggtccccaaagcatcacacacgggtgacaacgtggagcaaaaaagaattcctgaaccacgtgcaggaatggggacaggaaaaccccagcactgagagtgttcacctgggtactgagagacaggttcaaaggtgcggacagcagaatccgccacagtaactgcagactggaaacgccactggtgaccaccagaagaacttataaacagttacttctgcctaggaacagtcacaaaaaattccagaagtaaactatttataagtttaaagttgctgttgcgtgtcttgatgaagtctgggaacctttgctgcctctggctgttttccaaatgcccgcccacccaggacctggggagggggcagcggctcctttgtctccattatcagttgttatgttgattcactttcattatttagaggctttggtgatggcttccagaagctgcaaggagcaagatacagaaacaaaccagacagaaaactggctgggaaatccagatgtcctctagtaaaccagccgggaggtaagagatttgccaaggcaaagcaatccgccttccttcccatgaatgctttagttggtcttacaatcattctttggggaaatatctcactatcacgccaatgggctccttgctgttgtattctaatgagttaaacattatttcggtttaatttatacataaatgtattggtaggtgtaatctacatgagcagatctttcggagttgctaagtagttttttatggtacaaaaatctgttgatccctgcagcctgcgaacctctgaactccaggccagtatctgggcagatggctctggtttctggtctcagcctctgggttatcaatgcttacaacagaggcttagaaacagggttctgagacagagagcctcctagatacattccagaaagagagcaacctggctttgactaattatgaagctcagccctttgaaagtttgaatttaggaaatgagtcccctccattgattcacacaggatagcactcagatggcccacttgtgatggtggctgcagttgatagaccaagtggtccaggattaggacagtcctgacactggcaaccaaccccatttcatttttgtttatgtttttttttctttttgttgttgatgatgatggttgttgtttggttggttgggttttgtttgtttgttttgtgtgtgtgtgtgtgtgtgtgtgtgtgtgtgtgtgtgtgtgtaaaagggtctcagaccggggtataatgggtatatcttttttttcttttttttctttttttttcaagacagggtttctctgtatagccctggctgtcctggaactcactctgtagaccaggctggcctcgaactcagaaatccacctgcctctgcctcccgagtgctgggattaaaggcctgggccaccattgcctggcaatggggtatacctttaatcccaatgttcatgaggcagagtcaagtggatctctgcacttgaggctagcctggtctacacaggaattccaggccagccagggactaggttacatagagttgtgagtacccatatggttgctgggaactgaactcatgtcctctggaagaacagccggtgctccctactgttgagctgtctgtctacccacctcgctgacgccttcccagacacttccagtcatgctggcctaacagatacctgtgtctggcaagtctattaaaaccataactgtgtagctctggggttctggggttctggggttccatgtgctggcccaagagggaagcagagactgggaagcaaaatggggtgctttccacctctagaaacttaagtccctctccatttgctcccagcttccagacacctccttgtttcctgaaccaccccgccccatgtgcctgccccaaaaggaggtgaacccaaggcccagcccgttgctacctgagtactgtgtgctcattggccttccttcctacattagaggcagtcatttgactgaatactttgccaaggcataatgagagcctccagctgtcccccacaatgggcaaccccttcccacctgcctcctctaagtcagtgctgcagggacccgtagtgtctccaggatgcatgtctacctgagcaggaaacgcaggatgatggacaggaagaggcggcgccccgtgctctgtcccctgcactcggcatacatctgtgtgacagtgcagtcacccaggaaccaagggcctaccttgccacaaggccctagctgctgctagagtgctgtctcccacctcagccaggtggcgctgctggaggagaactgcctgtgtggctcggattgcaggtcaggaaagccttcctagtgcctccctcctgtcatgaaagcccactacatggggcctctagagccaccgtctcttaagtcatttgaactgtaagtgagataacactggcagtgtagacaatgttctctgagaacagggattttggtttctccctagatggatggtgaagaagtgtttattggatgctgccagcagctcacagtttctggaagtgggaagcactcagtagctgacaggcagcattttcttttatgataagaaacgccaggaaggctaatgtagctccctatctgtagttccggtgtctgcttgttcccctccgtcacaagaaggctgctgcagttcctgctgttgcatcaaggtctgatctcatccagagcacagctcagagtgggatcttctccagagcccccctcactttgccatagccaggcctgcttcacacagctgttctcaagctgtcactggccaggagtggggtctgtcatcccagcaagcaggtcaggatcccatgaccctggaggagagtaggtaccaagtccattgatgaagcagggtgggcagcaagcaacatgcagtggtagaagcaagggccaagcctgctgggagaggcgtacctgggcatgcttaggacccacagctggggaggctgcacagagcaaaggaacagatctcagggaaaagcatgtctgcccatggaaggccaggagaggagcccactgtagccacaaccctccccagctcgctctcctccagggtatgcacactgtgcatgcgcacacaggcttcacgctacacacaacacacacacacacacacacacacacacacacaaactgcacagtgtgcgcatgcacacaagctacatgctgcacacacacacacatatatgtgtgtgtgtgtgtatactgtatacatacatgtgatctacatgctaaatacacacacatatgagctgcacactgtacacatgcacacaagctgcatgctacctatatatatacttgtgtatatatatatactgtatacatacatacacactgcatgctacatatatatacatgtatatacatactgtatatacacacacacaagctgcatgacacacacacacacacacacacacacacacacacacacacacgcacaccggagctacccagctcacctcacggatgcttctccatctcccagagtcagcttaataggaaacagggcttggtgggaacaatttatgacaacccaagccctaaaatgaaaacatctgtccctgacatggctcagccgctccccagcacagcctggctcctgaggggcccaccagccctgtggggacagcagaatggaagagccctcagtcagagtttctcaaggcttcctgctgtgtagccaccacgtcatggcctcctagccttgccatactgaccactgagggctgcgactagccaaggagaccatttctcctggtggagacaggctccagcccccaagagcctctttgctctccagctgcccctgtgcaggacctgcctgcccaggtcccccaccttcattccccaagccctgatggctgctatctccttcgaggccaggttcagaaacagcctttaccaggctgat

SEQ ID NO: 112 - DNA, 1766 bp, Mus musculus
taggttctgactctgaagaccttctggaagagttgctctgcagcttggtacagttaatcactgatactccactcttggatatcacgtatgagatagcagtggaggccatctcggcaatggttgtcttcctttcctgccaactcttccacaaggaggttctgcgacagagcatcagtcacaagtacctgatgcaaggcccatgtcttccctacaccagtaaacttgtgaaaaccttattgtataactttatcagacaagaaaagccacctccgcccggaacccatgtcttccctcagcagtcggatgggggaggactgctgtatggactggcatcaggagtagcaagcggggcaggcagcaaagcagctgcgtccccagaacttacatctcctctggccaaccagagtctcctgctgctgctggtgctggtgaacctgacggatgccccagacatacccaacccctacaggcaagctgtctcgtcatttaagaacacgcaagacagcagtccgttcccatcatcaattcctcataccttccagattaactttaacagtttgtacacagccctgtgtgagcagcagacgtctgatcaggcaacgctgctcctgtacacgctgctccaccagaacagcaatgtcaggacgtacgtgctggcccggacggatatggaaaatcttgttttaccaattcttgagattttgtatcatgttgaggaaagaaactcacaccatgtctatatggcccttataatcctgttgatccttacagaagacgatggcttcaatcggtccattcatgaagtgatattaagaaacattacttggtattcagaaagagtcttaactgagatttccctggggagcctcctaattctggtggtaataagaaccatccagtacaatatgaccaggactcgagacaagtacctgcacacaaactgcctggcggctttagcaaacatgtcagcgcagttccgctccctccaccagtacgctgcccagaggatcatcagtttgttttctttgctgtctaaaaaacacaacaaggtcctggagcaagccacgcagtccttgagaggtcccctgagctccagcgatgtccctctcccagattatgcacaggacctcagtgtcattgaagaagtgattcggatgatgctggagatcatcaactcctgcctgacaaattctcttcaccacaacccaaacttggtgtacgccttgctttacaaacgggacctctttgagcaattccgaactcatccctcattccaggacataatgcaaaacattgacctggtgatctccttctttagctcaagacttctacaagctggagctgagctgtcggtggaaagggtcttggaaatcattaaacaaggggttgtggcgctgcccaaagacagactaaagaagtttccagaactgaagttcaaatacgtggaggaagagcagcctgaggagttcttcatcccgtacgtctggtccctggtctacaactcagcggtcggcttgtactggaacccgcaggacatccagctgtttgccatggactcggactgaagcaggacacagccacgcccaccccagccacgcccaggagcagaggcagacagactgcggcaccacagagggtcaaacaagcgtgcttccctcacacactgtgactattgggagactgcgccagttagcagtagttcactcagccttgattgtactgcaagggcgagacaaaaataaacgggaaacgtgctgttcaacatg

SEQ ID NO: 113 - protein, 508 aa, Mus musculus
GSDSEDLLEELLCSLVQLITDTPLLDITYEIAVEAISAMVVFLSCQLFHKEVLRQSISHKYLMQGPCLPYTSKLVKTLLYNFIRQEKPPPPGTHVFPQQSDGGGLLYGLASGVASGAGSKAADELTSPLANQSLLLLLVLVNLTDAPDIPNPYRQAVSSFKNTQDSSPFPSSIPHTFQINFNSLYTALCEQQTSDQATLLLYTLLHQNSNVRTYVLARTDMENLVLPIILYHVEERNSHHVYMALIILLILTEDDGFNRSIHEVILRNITWYSVLTEISLGSLLILVVIRTIQYNMTRTRDKYLHTNCLAANMSAQFRSLHQYAAQRIISLFSLLSKKHNKVLEQATQSLRGPLSSSDVPLPDYAQDLSVIEEVIRMMLEIINSCLTNSLHHNPNLVYALLYKRDLFEQFRTHPSFQDIMQNIDLVISFFSSRLLQAGAELSVERVLEIIKQGVVPKDRLKKFPELKFKYVEEEQPEEFFIPYVWSLVYNSAVGWNPQDIQLFAMDSD

SEQ ID NO: 114 - DNA, 440684 bp, Homo sapiens
  misc_feature (1)...(440684): n = A,T,C or G
gctcccctgctaaactcattagctatgtgatctatccaagcagcaagaagatggccatgccatggcaatcctcttcccattttccctcgccactcagggctcaacagcagggtgaggcttgcggggtggtggtggggggagcacaagggctactttcccccagtacaacatggcatctgatgcttgatgggagagcagaactggtgagacttgagggaagggtccagggcctgtattcagtcagggtcactgctggaagaggaggaggaagaggaggaggaggaatgcttgccatgcttgtggtgcttgtgcatctttttatgagctttcttcattttcttctacatcttcttgtccactatcactcctggtccaaccaagccaggggccaagggattcacaggaggcattccaggggcaggtggtgggtatggaggaaggtagggacccgaaggttggacaccctggctgtggcacaggatgagggcgtccacctggggggaaagctggattgccctggggagctcctgagggaggaggaaaggggctgggggaaagggtagattgacaggtggtgggtgggcaggattggaacctccagggtacccgatgttggggggatatggatttggccctggctgcctggcattgggattccacatgtttaggtgtgtccttcaaccccatcacctttccaccactgcctgggcttgatgtgttctctgtagaagattttttaaaatacagatagtataaaaatccttcctgacccctcatttggatattttttaatggtgccttttttttaattgttgacgttcaagatagactttaaacaatctgaaggaaaataaatcaatatcaatgacagtcatgcacactcaagcaatctgtttcaaagcctaatcatttgtcatctattctcagtgtttctattataatttttattataataatagtacaggctgaatccccagcacctatagcagtgcctggttcagagtcgatacttaaatatttatggaatgaacactaaatgttctctcaaaaaatgataattcagaaatatctgtatattgcaaaaagtaaaaggtcttccttaccctcccctgctccattctgatgattatgtgaaaggaaaagcctctatccttggtgaatctctcatttagcttttcttttttaagaagttgtgtattctggtggtctttaacagaagagggctatgtgttattgggggttcattgccacctgtaggaggcaaaataacctgtgatgagttggccccattgaagtaccacacctctaggaagccttcccttcctccccttctcttgcccttgtttctgcaagctctgtacaacacttcttatccgggtgaccttgccctacaggtagctggctacctgctgtgtctttcacaggatggtgagctccttgtagacagtgctgtctttatcttgccacctcccacagtgccttggagggtacagttgctaaacgttttggaactaaacagaaaaaaacacagtacaataagaaattaccataatgctaaatcaacaaattactcgaatctcttcccctgacactttagtagctcttgaaagggcaatttcagtgatcttgtcaaacagctaagtcacatggtgacctagaagagggcttggaagtttgagtcattgccgttcaatactctttcctctagacatcctgacccccatcctctgcaaaaccatgggcagtgcagagtaggtcacaagtattgtgtttttatttgtttgtttgtttttagagacgggatcttgctgtgttgcccaggctggtcttgaactcctgggctcaagtgatccccccaccctggcctcccaaagtcctgggattataggtgtgagccaacatgcctggcctgagttgtaaatcttccaggctcgtgccactggcttctgggagactataagatatgacctagtgtaaatggaaataatttttacctatttgggttcaaagacaccaataaatctgttcttggccaccgaggtcagttctatttcttcaaatcttgcctagagtagtgtttgcacctcatgttatgggttgaattgtgtccctccaaaattcatttgttcaagtcctaacccccagtacctcagaatttgatctttcaaaagacaaaattaggattgggtgtggtagctcatgcctgtaatcccagctactcaggaggctgaggcatgagaactgattgaacctgggaggtggaggttgcagtaagcccagatcacaccactgcactccagcttgggcaacagagcgagaaaaaaaaaacaaaacaaaattacaacaaatttaaatatcttaactgcttttatttacaattctagaatcaagcaacacctcatcctataaaataaaacgggtgttcccaagagctgagcagaggagtttggtccaatggagagaaaaaggctaaggaaagcggaaacagaaaacaaaaagtggattggttgtttcagagttactttcttgttaaggctgaagcagaggggatttccttatcatgccggctaaaactggcttctttggggatttggctattatccctcactctcttcatttctcagatggtcagataaacaaattagtttcaatttggtgacatggaaccttagcatgaatgactccattttggttgggcctagtgcaggagctcagtccaagccaatggccgcctataaattttatttaacaggctttatttggaaataggtacattgtagatagaattaggttataatgaagtcaccagggtgggccctaacccaatatgactggcgtccttatataaagaggaaatttctatgtaaacacacacacagaggaacatgtgaagatgaaggtggatataagggtgttccttctacaagccaaggaatgccaagaattgtcagtagaccagcagaaagtaggggagagcatgaaacagtttcttcctcgcagccctcagaaggaaccaactctgacaatgccttgattttggacttttggcctccaggcctatgagacaataaatgtccactgtttgtggtactttggtatggcaccctagtaaaccaatatacccaggtattacagtcagatattacagtccatgttagctggaaacacaagctaactctgaggaagccaagtgtgagtcttccaacactggcagtgttggcaaaaggagctctgggacagccttttccagtgagtgacagtgtgggctgtgcagctagactgctggtgtgtgagcctccactggctagctttgcaatgttgggaattgtatttaacttgttgcggctgtacaatgggggacaataaataagtaccttgtcttagtccttttgagctgctataacaaaataccacagactgggtaatttacaaagagcaaaaattggacaggcacagtggctcatgcctgtaatcccagcattttggggtgccgaggcaggcggttcacgaggacaggagttccagaccagcctggccaaaaaactccgccttaaaaaaaaaaaaaaaaaaaagcagaaatttatttcacacagttatggaagctgggaagtccaagatcaaggcaccagcatatttggtgtctggtgagagccttcttgctatgtcctcacatggaggaagggcagaggggaaaaaaggcctaggtagttctctcaagccccctgctttttttttttttttttttttagatggagttttcactctcgttgcccaggctggagtgtaatggtgcagtctcagctcactgcaacatccacctcccaggttcaagtgattctcctgcctcagcctcctaagtagctgggattacgggtatgcatcaccaagcctggctaattttttgtatttagtagagatggggtttcaccatgttggtcaggctggtctcgagccctcttataaggctagtgatcccacttgtgaggagggaggagccctcactccactcaatcacctccccaaagacctcacctctttttttttttttttgagacagagtttcactcttgttgtccaatctggagtgcaatggcactatctcagctcacagcaatctctgtttcccgggttcaagcgattctcctgcctcagcctcctgagtagctgggactacaggcgcacgccaccacgcccagctaatttttgtatttttagtagagacggggtttcaccatgttggccaggatggtctcggtctcttgaccttgtgatctgcctgcctcggcctcccaaagtgctgggattacgggcgtgagccaccgcgcctagccctggtttggtttttttttttagagacagggtctcgctcagttgcccagattggagtgcagtggcatgatcatggctcactgcagctgcgatctcttgggctcaagcaatcctcctgctccagactcccaagtagctaggactacagctgtgcaccattacgcccagctatttttttggtagagatgggggtctcactatgttgcttaggctgagctggaactcctgacctcaagtattcctcccttctcagcctccaaaactattggaattgcaggcatgagccactgcacctagcccccatgttaactattattagtttgtgacttttcctaatttgtcccagacaggaaggagacagtgacagctgcactgtgccccctccctaagttctgccatcagaactgctcctctgacatcttttctgatggccagaaggccaccaggacccatagtgatcaggctgtctcaacctctttccccaggctaggctaagggctcaggaaaaggaagaatgaatgggggctctgtagagtgcatctaagctctcctgcatgcaggagggactggagaacgaactgtgtagcttcttaccttatcaggcaggcaatacccaggaatgctggagtcactgcttttggagcattcaaactctctgcagcactttctgagtcttgctgctaacagctggccttgcaaggaattcattaccatagcaccacaggaggccttagaggacgccggttcaggagcttgctcagtcatttgtgcagctcactggctgtgcatctctgtcggaatcctctcatgtccctagaactcaaatcactaacattccctacgctgttgtaactttattttactacctgttcagccagcctctgcttgaacacatgcagtgattgggatctcatttctcttccacatagaccatttcactactagtaagcttaatttcactgaaccacctatggtgaagtgattcctgagtcattaaataactttctactgcaccctttctcatagggttatttggagacttaaataagataacagtgccttgctcacagaaaacagcctgtaatgtgaattgacaattattgctgctgatattgttttcagaaagttcttatatggagctgaaatctgcattctgtaacttcgaaaacttggtcttaatttggctcattggcataacagaaaataagtctaatcatgcccccctgaggatggttctacttatcacaagtctcctcttagtctagttcttcatactcagttccttcagcccttccacatgggacgtaatttccagatctctcaccatcctgactgcccttccctggacaggttctgtttgaccttcatccctccttggaggagtggccaggtgctggcaactaagacatgcgagctgtccaccatctggattatgcagatgaactaacattgaaaatgacacgctacatgcattacttaatttcgttctcacagcaccttcatgaggagaaaactgaggctcagagatgttaagtagctttccccaaatcgtttagctcagaaattgtggaaccagaattcaacccagatctgtctgactccaaagtctgctcttctttcttggggaagtggaagcctgagtgctgttcttggaacagcctcaagacaataatctggggactgtcttggtcctgcttgcagagggtccttctgttacgtatgggtcctttctggccctttagcttctacaaagaaagtcagtccccctccagctctaaagacacatgaagtctgtttgcagtccagaccttgcaaacttgtagttatagaaacctcagaggcctaccagggcttgaaggatatttggctccactttacatctccattcttcttttcctcctgtttttaatgtaacctgtaatcctagcaatttgggaggctgaggcaggtggatcacctgaggtcaggagttcaagatcagcctggccaacatggtgaaactccgtctctactaaaaatataaaaattagctgggctaatttttaattagtgtggtggcccgcgcctttattcccagctactcaggaggctgaggcaggagaattgcttgaacctggaaggcggagattgcagtgagctgagattgtgccattgcactccagccttggcaacaagagtgaaactccgtctcaaaaaaaaaaagtattctgtccaccacgtggaataatgtaatatttagtaataagaacagctgcaaggtgtagagagttaccgtatatccatcacccagctttccttaacgttaacattttatataaccacagcatcattttgtcaaaactagataatcagcattggtacaatactgttaactaaactctaaacttcatttaggtttcatcaggctttccactattgcctttttcaattccaggatgcagtccaggatatcctattggatttagtggaaggatttcatacattttctattgctgttcctgcactaactagacactgaagttgtcaagtcagccaaagttannnnnnnnnnnnnnnnnnnnnnnnnnnnnnnnnnnnnnnnnnnnnnnnnnnnnnnnnnnnnnnnnnnnnnnnnnnnnnnnnnnnnnnnnnnnnnnnnnnnnnnnnnnnnnnnnnnnnnnnnnnnnnnnnnnnnnnnnnnnnnnnnnnnnnnnnnnnnnnnnnnnnnnnnnnnnnnnnnnnnnnnnnnnnnnnnnnnnnnnnnnnnnnnnnnnnnnnnnnnnnnnnnnnnnnnnnnnnnnnnnnnnnnnnnnnnnnnnnnnnnnnnnnnnnnnnnnnnnnnnnnnnnnnnnnnnnnnnnnnnnnnnnnnnnnnnnnnnnnnnnnnnnnnnnnnnnnnnnnnnnnnnnnnnnnnnnnnnnnnnnnnnnnnnnnnnnnnnnnnnnnnnnnnnnnnnnnnnnnnnnnnnnnnnnnnnnnnnnnnnnnnnnnnnnnnnnnnnnnnnnnnnnnnnnnnnnnnnnnnnnnnnnnnnnnnnnnnnnnnnnnnnnnnnnnnnnnnnnnnnnnnnnnnnnnnnnnnnnnnnnnnnnnnnnnnnnnnnnnnnnnnnnnnnnnnnnnnnnnnnnnnnnnnnnnnnnnnnnnnnnnnnnnnnnnnnnnnnnnnnnnnnnnnnnnnnnnnnnnnnnnnnnnnnnnnnnnnnnnnnnnnnnnnnnnnnnnnnnnnnnnnnnnnnnnnnnnnnnnnnnnnnnnnnnnnnnnnnnnnnnnnnnnnnnnnnnnnnnnnnnnnnnnnnnnnnnnnnnnnnnnnnnnnnnnnnnnnnnnnnnnnnnnnnnnnnnnnnnnnnnnnnnnnnnnnnnnnnnnnnnnnnnnnnnnnnnnnnnnnnnnnnnnnnnnnnnnnnnnnnnnnnnnnnnnnnnnnnnnnnnnnnnnnnnnnnnnnnnnnnnnnnnnnnnnnnnnnnnnnnnnnnnnnnnnnnnnnnnnnnnnnnnnnnnnnnnnnnnnnnnnnnnnnnnnnnnnnnnnnnnnnnnnnnnnnnnnnnnnnnnnnnnnnnnnnnnnnnnnnnnnnnnnnnnnnnnnnnnnnnnnnnnnnnnnnnnnnnnnnnnnnnnnnnnnnnnnnnnnnnnnnnnnnnnnnnnnnnnnnnnnnnnnnnnnnnnnnnnnnnnnnnnnnnnnnnnnnnnnnnnnnnnnnnnnnnnnnnnnnnnnnnnnnnnnnnnnnnnnnnnnnnnnnnnnnnnnnnnnnnnnnnnnnnnnnnnnnnnnnnnnnnnnnnnnnnnnnnnnnnnnnnnnnnnnnnnnnnnnnnnnnnnnnnnnnnnnnnnnnnnnnnnnnnnnnnnnnnnnnnnnnnnnnnnnnnnnnnnnnnnnnnnnnnnnnnnnnnnnnnnnnnnnnnnnnnnnnnnnnnnnnnnnnnnnnnnnnnnnnnnnnnnnnnnnnnnnnnnnnnnnnnnnnnnnnnnnnnnnnnnnnnnnnnnnnnnnnnnnnnnnnnnnnnnnnnnnnnnnnnnnnnnnnnnnnnnnnnnnnnnnnnnnnnnnnnnnnnnnnnnnnnnnnnnnnnnnnnnnnnnnnnnnnnnnnnnnnnnnnnnnnnnnnnnnnnnnnnnnnnnnnnnnnnnnnnnnnnnnnnnnnnnnnnnnnnnnnnnnnnnnnnnnnnnnnnnnnnnnnnnnnnnnnnnnnnnnnnnnnnnnnnnnnnnnnnnnnnnnnnnnnnnnnnnnnnnnnnnnnnnnnnnnnnnnnnnnnnnnnnnnnnnnnnnnnnnnnnnnnnnnnnnnnnnnnnnnnnnnnnnnnnnnnnnnnnnnnnnnnnnnnnnnnnnnnnnnnnnnnnnnnnnnnnnnnnnnnnnnnnnnnnnnnnnnnnnnnnnnnnnnnnnnnnnnnnnnnnnnnnnnnnnnnnnnnnnnnnnnnnnnnnnnnnnnnnnnnnnnnnnnnnnnnnnnnnnnnnnnnnnnnnnnnnnnnnnnnnnnnnnnnnnnnnnnnnnnnnnnnnnnnnnnnnnnnnnnnnnnnnnnnnnnnnnnnnnnnnnnnnnnnnnnnnnnnnnnnnnnnnnnnnnnnnnnnnnnnnnnnnnnnnnnnnnnnnnnnnnnnnnnnnnnnnnnnnnnnnnnnnnnnnnnnnnnnnnnnnnnnnnnnnnnnnnnnnnnnnnnnnnnnnnnnnnnnnnnnnnnnnnnnnnnnnnnnnnnnnnnnnnnnnnnnnnnnnnnnnnnnnnnnnnnnnnnnnnnnnnnnnnnnnnnnnnnnnnnnnnnnnnnnnnnnnnnnnnnnnnnnnnnnnnnnnnnnnnnnnnnnnnnnnnnnnnnnnnnnnnnnnnnnnnnnnnnnnnnnnnnnnnnnnnnnnnnnnnnnnnnnnnnnnnnnnnnnnnnnnnnnnnnnnnnnnnnnnnnnnnnnnnnnnnnnnnnnnnnnnnnnnnnnnnnnnnnnnnnnnnnnnnnnnnnnnnnnnnnnnnnnnnnnnnnnnnnnnnnnnnnnnnnnnnnnnnnnnnnnnnnnnnnnnnnnnnnnnnnnnnnnnnnnnnnnnnnnnnnnnnnnnnnnnnnnnnnnnnnnnnnnnnnnnnnnnnnnnnnnnnnnnnnnnnnnnnnnnnnnnnnnnnnnnnnnnnnnnnnnnnnnnnnnnnnnnnnnnnnnnnnnnnnnnnnnnnnnnnnnnnnnnnnnnnnnnnnnnnnnnnnnnnnnnnnnnnnnnnnnnnnnnnnnnnnnnnnnnnnnnnnnnnnnnnnnnnnnnnnnnnnnnnnnnnnnnnnnnnnnnnnnnnnnnnnnnnnnnnnnnnnnnnnnnnnnnnnnnnnnnnnnnnnnnnnnnnnnnnnnnnnnnnnnnnnnnnnnnnnnnnnnnnnnnnnnnnnnnnnnnnnnnnnnnnnnnnnnnnnnnnnnnnnnnnnnnnnnnnnnnnnnnnnnnnnnnnnnnnnnnnnnnnnnnnnnnnnnnnnnnnnnnnnnnnnnnnnnnnnnnnnnnnnnnnnnnnnnnnnnnnnnnnnnnnnnnnnnnnnnnnnnnnnnnnnnnnnnnnnnnnnnnnnnnnnnnnnnnnnnnnnnnnnnncgtccacctcggcctcctaaagtgctgggattacaggcgtgagccaccgcgcacggctgtttttgcgcttctcgtttcgccacgtggctttgcggtagcccaggaggtactaggagggcggaggcacgaataacacccaaaggactacagtttccagaagcccgcgcgcgccgcgtgccacgtgaccacctggctggcgcgcgcgcctgggggtctggtccctagccgcgttctcggtcgcttccctcttctctcgccgcctcctggcctccgcaccgacgcggcccgggctggagccgagccggggccgagctgcaggccggaccggagccggatctgtacccgctgagacgtggaaacatggaggcctgagccggtgtgcgccacctgggctgcggcggcgacagcgacttctcctgacccctctgccaccctcccatccgtccgcgggtccgtggagctggagcagatcccccagccggctgagacaggtgggctgtagcgccgcccccctcagcgcggccgggcccgaaagcctggctgtccccggcctcctgtcagagggggtcaggggccaccctccgcaacccggccagcgccccggggcggcggcgaagggaccctcccttccctgcccgcgggcgcctgggccacccggaggggctgtgctgacagcggacggacctctgtccgagtccgctgttgggagttgggggataccgaaggccaagtcggtgcttccggagatggggcggtgttggtctgacaaatgggcgtgtgatgggcagggtgagcaatagctgttgggtttttctttcttctttttacattcatagtttatcgaggtataactaacatatcagaaaattaaccctttaaaagtacaactcagtggtttttagtatattcacagggttgagcagccatcaccacccttaactccagagcatttttaatcaccgccccccccgccccaaagaagctcgtacccattagcagtcactcctccttctctcccctacactattgatctactttcagtcgccgtggatttgcctgagcaattgtgttttgactgaaaagtgaaagggtgggtgtttgtgaactgggggcagtagtggggtttgagggtattggtgtggtaaagctgattggataaagctgttctctactgaacaggggtagagaagtgatgggatgattgtaatcggccagcaaagcgggtacccaggatagactgattagggggcacagatggagtgagttccttgaaagaggagaggggaagttggagagaggggtgtgtagagcaagggtgatgtgctgaaggatgaaaacctggagggtggaggccgtggagaggaatgtagcgtccaccagaggaactcaggtgcttaggctgatgagttgagggctcaagagaagaacgaggtggaagggaagagaatctataggaatgggtgaatggttgttgcagaggatgaaatttatgaatatatggatttctggagtgattatcctgctttgaagttttattttagataatcctctcagcaacttggagatagaccggacaagtatgaatattcccattctgtaaatgaagaactagtcttttagaggttaggtgtctgccttaagctcataaactgagtacatagggcaaaatgagttggaataattgatgaaactatcagtcgcaagtggattaaatggcagagaactgagttggggcaatgttaataggaaggagattcagctattaagaagtctgtgttgttacgacatataggtcaaggagtttttatgtttttgcaccttttaaccatagaaaagttcacacagtgaaataataaagggtactcccatgtacccattacccagcttcagcagttaactcatgccaatttaatttcatctatgtccctatgcattcctatccccactcacaattattttaaagcaaatcatagacattcaatttcatctgtaaatatttcaatatatatctgtagaagattgaattgcttttttttgttggtggtggtgggaggcagagtctcgctctgtcgttcaggctggagtacagtggcgtgatcccggctcacggcaacgtctgcctcctgggttcaagcaattctcctgcctcagcctcctgagtagctgggattacaggcacgtgctaccatgcctggctaattttttgtatttttagtagagacgggggtctcatcatgttgctcaggctggtcacgaactcctgagttcaggcatttcacccacctcagcctctgaaagtgctgggattacaggggtgagccactgcacctggcctgctctttttaataggcccagaataccattatcacacataaaaattaatagtttttaatatctagaaagatttactgtactttaaaaaagtgtggtaatccatttgatacaaagaggataaacagtgcaaacgcttttatgtttgactctgaaaaatgtggcataattatctcctgatttttccattagatcctgccatcctgattgttccttttttttttattaatatggctcatttttctacagaaagtttgaagaattgtcactttggtaggctttttaatgaatggagggcaggagagaaatagaagtgaaatatgttacaacatgtacaaatggctctttcttatattgctccaaatatttgggcaatttggttatgcttttctagataatttcacatattattagaagttgtttaatgttatgtatcagttttctatgattgctgtaacatgttaccacaaatttagtggcttaaaacaatgcatttattattttacagttctgtaggttagaagtcaaagtgggtctcactggctgtcaacaaggctgtgttcttctctggaggtttctagggggcatctatgcctcttccagcttctagaggctgccactttccttggcttgtggcgtacctcctctgtcttcaaagccaccagtgttgcatctctctgatcatacttccatcctcaagtctctgaccacaagtgggaaaggttctctgcttttaaggacccatgtaattaaatcaggcccacttagctaattcaggataaatcccccctcgaggttcttaatttaatcacgcctgcaaagtctcttttcccagcaacataatcagagcttccatggattagtatgtggacatctttggaggctattattctacctaccacagtgtattttggaatattttgccgagacttaagaaagtaggtgatttcttttgctgctgtacatgcaacgagagggccgtcttttacttaggattgtagataatgggaatggttagatctagagaagactgttcatttttccttttagtgaaatatgggaaatacctgtgacacttgtagtataggctttggtaaaatgagacctttaaaaatgatttaagtataaaagcaatacagctccatgtaaagtttttctatatttcgttttggtctctttttcatattcatgtcttaaaacatagtatatatgtgtaatcagagggctaacctgatacttgacacaggacacgctgggggcaatgatggttcccatgcccaggatgagaaggcagggactctctgtccaagtgggagataaaggcacccccatttcagcagcaaaagaagactcctaatgaaagtgagagaatatcttcaggcagaatgaactactgtgagatttggacttgaagcagcctcttctcaggttcttctgtgactcagctgggaatggtagagtgctgtgagcctagaagagcagagtgataagatgcccattgctgcttttcctttcttcggacagagagaggactaatcttaaagattgaaaggatttctgggagtcctccagtttggtatcctgtttcctagtgggtttcactttcctacttagctgtcaaagtccttactgtctctaggtgtgaaggttctggctttctggtggtggtgcaccatttatcaggaaatgtgatgggacttattaaatatctgctcttgcctttaagcatttttttttctagtaaggtttttagcagagctttatgctttgaactttgcttgtaaacagtttgtaagttatcctcacattacttaattctagacaaaatgaactagtggggctgggaacaactttacatataggtcttatttagtaaaagtttttgtttttttcatttcttaaggaagtttggttagtgattttggtatcttctctgatttttatcacattctttaaaaatgcaggcaatgaaagtggctgaaactttccaataaggacattggaataattatttttaaaaagcttatcttttcttttattgctcagtcttttgggcatttaaaaccttttgtccatcatatgatcgatgacaaatttctttgttaggttgagtcagtcactgaatcttgacaattattccttcaaaatatgtcatgcaaccctccacccagaatactttgaaaaccctacctgtatcagttaggcttaggtttggctatgaataacagagacctgaaaaataatagcttaaacatatgactagtttgtttcttttgtaaaagaagtccagaggtggacgattaaaggctggtttggcagctctgctgtcatcaggaacccagcctccttgtagtttcttacactgttaaccctaaagtatggcccttgatttctgggtccaagatggctgctggagttctagctaaaatttccatgttcctaacagcaggatggaggaagggataaagaagtgactgtccactcttagagacttaaatatatcttagttgaacaggaatatgcctggtcaaaaaaatggagttctgttactaaaaggaagagaggactggagattgggtagggaattagcattttttgcttttttttttttgagacagtctgactctgttgctcaggctggagtgcagtggtgggatctcggctcactgcaacctctgcctcccaggttcaagtgattctcctgcctcagcctcctgaatagctgggattacaggcatgcgccaccatgcccggctaatttttgtactgtttttagtagagttttcaccattttgcccaggctgtctcgaactcctgacctcaggtgatccacccacctcggcctcccaaagtgctgggattacagacaggagccactgcgcctggcctctgctcctttataattaatttctctgaacccagactaacctacatactttttgaaactctaggtttgagtcctagttctatcatttatttgctttggcatgttactcaacctttttgaacttcagttttcttatctgtataatgggactaatatatactttatatgtttgttagagaattaaatgaaaatacctctatgtacctagcaatatatacactataactattagttgtttttcattctcttcctttagatttctcgacttggatatctgaatgagtggtgtaaaaagatgagaattagagatggacaaggagaaggatgtatattcagttcagtattgagcatgtggagtttgaggtgcccttgggacatcagatggtgatagatgttaggcagttagataaacgggactgacactcaaaagacagttctgactagacatagatattttggattgtaagtgtataggggtagaattcatcaatctggaagtcttagggaggatgtatgcagttgtacggttactatgtgcggagtaagaaggcatgccctttagtgagtctctctgtaaagcgtcaagcctcagcttactttctggccttttctttattatttttatttttttgtgggttaaggagtggaaagtctaatagaagaaaggagagaggagagcagctccttgagagagagagagagaggtccaaaaaaggaggaggccatggaccgcagcagatttttttttttttttttttttttgagacagagtctcgctctatcacccaggctggagtgcagtggcgcgatctcggctcactgcaaactctgcctcctgggtctacgccattctcctgcctcagccacctgagtagctgggactacaggcgccggccacaatgcctggctaattttttttttttttggtatttttagtagagacggggtttcactgtgttagccaggatggtctcgatctcctgacctcgtgatccaccggcctcggcctcccaaagtgttgggattacaggcctgagccaccgcacccggcctgcagcagatttttatatggagaaggcagtgtctgatttacatagggctcacagattggttcgatcatgcatgacgtctacagagtgtgtggggaaggctggttgcctcaacctaatcttatgcaaatgggctttccagttgattggcaccatcctgtctgctcctttacagtacatgtggctggcagagaagggaagatggagccgccattttgaaaatgtctagtccttagtttctgcaggcattatcgtgtgcaagctcccagcttgcaggctgctctttgttagaaaatgatttggggctgcttttcattaaaaagaacagccttactgaggactcccatgcccttgctatctgcctaagtaattccttgttaactcctatatcatcattccctgctctggagtggcaaccctaactgctgttagggggtgttgggtgatgactctttctggctacttcctgctgaaaaggggcatcatgtggggatcagcagctagggctcctcctggggtcaatctaagggtccttggaagaaaggcatgtccgtgtgtggttctgtctgcagcatcatttggagtttgattctgttgctattctgatgggttgtaacactggtttgcctccaccagatgttgttgaaatgttaatataaaagtaacattccttttaggataagtggcattggatttgggtggctggagtaactttagtgttaaccttggctagatctttcctgcagttatcaatcccttcatgacttccacagaaaatctctttcctttataaccttctttgcatagccagggtgtgacatattaccaaacccaataagaagttctagcaaactcggtgttagtaaaactttcgtgcttcctttttgttggtaattatccctgctatcaggataataattaagcaaattctacaacaatgaaaactctctttccagtatttcagttagaaggtgctattgtgtccagaattggtgggttcttggtctcattgacttcaagaatgaagccacggaccctcacggtgagtgttacagttcttaaaggcggcgtgtgtggagtttgtccttctgatttcggatgtgttcggagtttcttccttctggtgggttcgtgctctcgctggcttcaggagtgaagctgcagaccttcgcagtgagtgttacagctcataaaggcagtgtggacccaaagagtgagcagcaacaagatttattgcaaagagcgaaagaacaaagctcccgcagtgtggaaggggacctgagccggttgccactgctggttggggcagcctgcttttattcccttatctggccccacccacatcctgctgattggtccattttacagggtgctgattggtgcgtgtacaatccctgagctcgacacaaaagttctccaagtcccccctagattagctagatacagagtactgattggtatatttacaaaccctgagctagatacagagtgctgattggtgcatttacaaaccttgagctagacacagggtgtggattggtacatttacaaaccttgagctagacacagagtgctgattggtgtatttacaatcccttagctagacataaagattctccaagtccccaccagattagctagatacagagtgccgattggtgcatcctcaaaccctgagcctagacacagggtgctgattggtctgttcacaaaccttgagctagacacagagtgctgattggtgtatctgcaatcccttagctagacataaaggttctccaagtccccactagactcaggagcccagctggcttcacctggtggatcctgcaccagggccgcaggcagagctgcctgccagtcccgcgctgtgcgcctgcactcctcagcccttgggcggttgatgggaccaggcgctggggagcagggagcggcgctcgtcagggaggctcaggccacgcaggagcccacggcagtgacttggagaacctttatgtctagctgagggattgtagatacgccagtcagcactctgtgtctagctcaaggtttgtaaatgcaccaatcagcactctgtatctagctaatctggtggggacttggagaatctttatatctagctcagggattgtaaacgcaccaatcagcaccctgtcaaaacagaccaatcagctctctgtaaaatggaccaaatcagcaggatgtgggtggggccagataagggaataaaagcaggctgcctgaaccagcaatggcaacccgctcaggtccccttccacactgcgggagctttgttctttcactctttgcaataaatcttgctgctgctcactctttgggtccacactgcctttatgagctgtaacactcaccgcgaaggtctgccgcttcactcctaagccagcgagagcacgaacccaccagaaggaagaaactccgaacacatccgaacatcagaaggaacaaactctggacatgccgccttgaagaactgtaacactcactgtgagggtctgtggcttcattcttgaagtcaatgagaccaagaatccaccaattccagacacactgccatgtataaccctactgcaaatagtagagtgagtatagcaattcccacaagtgtggtgtagtagatactttccatctaaaattttatttgccaaggtatccagatttttgtgttacccatctctttttgtttcttgtaagcttcaggagatcaccacttgattcacaggaataagcagtgttagtctaaaatgtaggcacacaacttaaaaacaattaatgtgactaggatttaatgacaaatgtatgataagctttggagcatattttctctctctagtcctgattttggtaaaaacaaattatgataggaccgtgttgtttgtagaataaaccttagtcttatatttggccttgttatttgcataaagttcagcaagagtaattatttctgcatagtccttttggattggcttcgatggaactctgttccacaagaaatctcagataagacttcttaaagctgagcccagcatgggtttgtatcttcaaatacctgtgagttgggtgatccttttctcttaaggtcccaagataaacttggagctcctggacctgttagaaagtgacattctttactgaccaaaggttaggaaccctgtgcggggactgtgtagacaaggtatgaggccagttcttcccatggggctttttcagctctgcaagtggaggttgactccttaaagggaagcatacacttccagtcaaagccttgataaaatagccagtttttccatttgtgtcctgttgaaaaagaaaaatggattcttatttcactgatgcaaacaactatattgccataagttaagagttctcacagattagaggaaccaggcagagagaaacaatcatgcttcaagttttgttcacaggagtataccttactcaattattaaaggctgtaaatagttcaaaataagtttccttgactctgaaaaacaaaccaaggatcagcaatattccaagcagaagtcaaaaagattgctttagctttctgagtgtagtccatttagtcaattcttgttttgcttgatatttgtgaacatttcagttcatgagtcctgtacgttctttctctcttccaatgttacaatcttcaaagctgttaaaaacctgcatttgaggacacctgttgaaagtccttaatatagcttgattataaactgtcttttcagaaggaacaaagcaaaacaacaattgtctgtgcatgacaaaatttccaggttacagttaaaaacatgacggaaaaagtttagttaaccttaattatgattgatagtatatacttagacattagaattttagaaatcccatacaattttggaacatatattagtattattcaccaaaatataacttaaagaagattggacatcgttttggcaattctaatgtgactaaacatgtcagataatcctgtttacctcttctctggatgtttcaggggccttctgaacaatccagaaagccaggcatcaggaaggacaattttgaaacttgaagcttgattttgggatgccttttaaatgttagaggtttaaaacacttgatgttatgaaatagaattccaaattgccattatttattttgccaaaatgatgtcacaaaaggaaaaaatctttcatcatcctttactattacatgaaaatcctgtttaaagccaaattttacccttgtattagtttattaaagttgtaaacaaccttttgataaaacctcataggaaagttcacctaatcttaaccaatgaccatggggtgaagtctttacaaaccctttacaaccccttttgttaaacggcagattagtgtcttaagacagccttgccgtgtttttctttcaatgctcaatttaggaaaagaccatataatacccttttgaatttagttaatgtttatacatttttgcaagattaatttttgtcttcctgtaacttgcttaaacctttagctctgtcttattaaatttaagataatctcttatccctgggcaaaatttatattttcatgctttcttataatcttttactaaaaaacacatttcactgtttttataagccttgcatataaaactttagagatctcaaatacatgttgcactgttaactctcagcaacttttactttaggtaaaaaacctggttagtaagtgattttaattatataccaggtgtggagtctaggacccagacaaagtcaggcttatggggtcctgggcctgcatcctaacctaaggtaccctttcttttgacagaacgctacagaaagacacacaaagcacaccagattggttacagcttaagaccaacctcacaaattcttttttattaattaaaactttacagagaataaacaatcatccttattatccttgttactggtttgcacaggaagagataagccaaaatgttgactggtaaaaaaacttttacccttttgccagcatgtcaggcttctgggttcccttcccattagctcaactctaagtcaaccattttaaggtttggggaaattaacttttcctactttggaggaacattatacaggaagagataggaaccattgtacactgtgaaagaaggaaaaacaccatagaaaagtctggggattccagttagggttgtcaagaggtaccgcctctcttcctattgggaattgtgtttctcttatttctttgccttccctattttctcttttcgttttaggcctactataggaaacgttgcttatctttcaatttctttgctgcctgctcttcagctgtaattagggtttggcttagaagcaacataaaatctcttcatgagaggtgaaacacctgagttaaattttggaaagcttctatatacctatcagggtcttcagaaaattggcctcagtcacctttatttgcctaaggtcttgcaaagaggagggaacttgaaccctagtgacatcacctccattgggcatttcctgtagaggtaagagtgaaagtggggagtgggaaattttggagatggtggaggtggaagaactggtggtatggttggaggtggccctaaataagggggacttgaagggctgggacacccaatagctgcctcagatgatttccccagaagttgcttctctcattttggggaattattctctttgggcctgctcaatatgattgctaaaagggctgggttaattctgtaacgcttgcaaaggtctagtaaaaaggccatgccctgtgcaaaagaaaatgagctgctttttaaagtttcagggtcaaagaaatccttgtgcttcagaatgcactccaggggagtgcaggatgaagatggtacccacttagagaaaaaggtggccctttagtctccttccttttggtgtgacccatggtggagaggaagcagtgggggcatcccccctgcttttttccccctgtgtttcctgggtcccaggcaccttgttgaacatgctgcccatggttgcaagtgtgacccccagtcatggaaccagaggaactaagtcactggggctagtcatgctcacccaagtggctgtagtcctctgcctgtgatttccctttaacttcctagacttgtgtgacttgcctggcttcctgaaaaatggatttcaagaaaaactacataatagttgggcaaggcccctttaatgcaggggatgtgctagattgaactctgtatcctgctattatggcctgtgctgaagcatttacccttagataatggttccagttaacttccaaacttaaaattcccttactaattaagtactactctaattgaaggcagaataggtggcttaaaaaaacttagggattgaatggccattttcctgctgatgagacagtattgagactaaattttggctttggaggaatattttacccctaattgttgaaggcagagttttctcatttacagaaccagcataaagcctggtttctagtagagaggcacaaaaaggaaagagaattgggaggctaggatgtttcgttggactgacagtgtgcttcatggagaggattcctatttcactaggtggcgctgttgaccttgaaacaccacatactctctagaccaagggcagagagagacctggaaaatgccatgtgctctccagaccaagggcagagaaagagagattctcactgttggggggtcagggagccctgttcttagaaaatcacaaagacgcttccccttgagctatatgccttgttactacgacattccctgatcttaccaaacaagactacttccctgaaccataaaacttcccacacatttcatacagagaggataagagatatgacggttgcgaacaggagaggaggagattacaataggaaagttggagatcctgttgccgacaccgcattggggcggttggcggctggggtccagaagcctttggataacaccagggggtagcgccggccagaaatcctcagttgccccaggacttcttccagccccacacgacagctaagtcctccatgaaaggtctaaaatggaagccgagaaccttggaatgaaaggacagagttagagttcgctcttccccttaccgttcttatgaatgttgtaccttggtatcccggacaaagctgccattatgaagtggctacactatctggggtgtataccctagggtttgttgttgcctgccgagaaagaattaggacacggacatgtgggtgggttaaggagtggaaagcttaatagacagaagaaaggagagaggagagcagctccttgagaaagagacgtgttcgaaaaaggtactttctggtctcttatgcttctgctttgattccttttctgttccagccatgttaaacttctttcaggtccttgaacaggccctacctgttatttcttaaccacagggcttcacacgtgctgttctctgctttggaagtttctgaactcccacatccacccaggccaacccttcttgtcctttaggtcttaacattttttttttttttttgtgatggagtcttcctctgtcttgcccaggctggagtgcagtggcgtgatctcagctcactgcagcctctacctcccggtttcaagtgattctcctgtctcagcctcccaagtagctgggattacaggcgcctgccaccacacccagctaatttttgtatttttagtagagacggaatttcaccgtgttggccaggttggtctcgaactcctgacctcaggtgatccacccactttggcctgccgaagtgctgggattacaggcgtgagccactgcacccagctggtcttaacttttatggtatgaactcttggaagctttcccttggaagcttgaatagttgccatcttaacatttcttgttgatgtatccgtatctctgtatatcattcccttcttcacaactttaaccttggcactttgcatactgctggccacatagtgggcactcaggaaatatttattgactgttgataggcttcttgcgcttaatgtaaccataatgtgatgtagcttatatatggcttatttggtttttcaaccctgnnnnnnnnnnnnnnnnnnnngaattgtttatatgaatcattgattatgaaatagtaaagctcattctctcttatttattttgatattttttctacttaaagtaatacttgtatattgttagaaaaggtaaataataataaaggcaggttataaaaaatcagcagtatccttacccatccccactttttaatctcattttcagaggcagttacttttaagaactctgtctctctctctctctttttcttttggtagagatggggtctcactgtgttgcccaggccgttcttgaactcctagcctcaaatggtcctcctgcctgggcctcccaaagtgctgggattacaggcctgagccactgcacctggccctaaaaattcttttaagctttttcttttgattcttacctctgcgtttataaatctgcctaaattgctattttgtgatttatcaattttagataatacatattaacttcttgttatggtaggtggggtattcttccctttccttcccctatttctaaaagcacttccagtataggtatataagaattcttggttaatatagtgtttagcttttatattattatgactacataaatattgttcactgctggtgagtacttcaccatgtttccccttccctccccctagtttgcttagttttccatggatatattattaatttttaccaaatactttgaacggcctgtgggatttagtgcctaagaaattgatgcaaggtgttactctggctactgctattgcagttgttttgtgtccctgttccagaggtttcatgcctttttcagctttgtcagtaaagtaaaatctcagatccccaccatgcctgacttgacagtgtaacatcccccattttgtttgtgctttctttttggaactgttactattaatatattaaaatcttctaaattgttctttaaattttctattttttctcctcctgtttttcacttatttgtcctcttgttctttattatgggagttcccttaacttttatcttttctccgttcttttgttttaaatttcaggtgtcctttcttgttctttatttccttttttatgacatcctactcttgcttcatgaagcaatatgaaacggttaaaagagaatggtttctgtacctatcctacctgggtttaaaacctgatgtgccactttctagctctataatcttgggcaagttacttaacctttctttgctttagtttattcatgtaggttaggagttggtagacatttcatctaaaggaccaaatcataaatatttcaggctttatcagccaagaggcaaaatgaaggatattttaaattatttaattatttcattatgtaagtacttacataacaagagagaaaacatttctacaagttttttattaataaagctcaaaatgcgatactaataatgattgagaacaatttttgcaataaaggtttgctaatgagaagaatgaatgtttttttggaggagaggggataacatttggcttaattggagtttaaagttagtgttctctatcatcaaaattgattatagatgcagcattaaccacctattaatgctgatttgtaatgagatttcatgtatttcatctttgaaaatgtcttcttagatactgccaaatactgctaatagtctgtgaacatatggttttaatagagcatattcattgcttggacgacatttacagaattcttttagactcttttcttgatacttaacgtttagcaaatcattacactgcagactaatcacttccaattgaggattaggtagaagctcctcattgcacagttaaatgatttttgaaatgtggaatgttcgtttctacttgcattgaggtatgaaaaaatactgctggaaatatttgattttggaaaatatgtctgctgcatatttgtgtggcagtagagatcttcttattttaatttttgacagcataggaagtacatgaagcatcttgacatgacttgtgacttaggcaatgttagttgtccttgaaatgactgtctcaatataggttttgcacgtagaccctgttgtccttctaactttaggctgaattcattaacagatatatcaagtctgcagcaacaatagtagttgagggtcattcttttcattcagaaaaatttgtctcagcctggagcttgaaacatttcagtaaaactctgccattgttaagccattgtattgtttcgtggcaggacgcgtcaggatatttagcttctatttctgacaaaaatgtcatgagaacaaatgaaatttacctgtgacattacggttcaataacacatgatagattcagatgttttctgcagagtacctgctgattgagaatatgattaatagccataagctttaaacaccttacatttcacaaggcttgtaaattttgtccagctaagcctttttctgcttcatacatatttttaccaccatcagttgttacacatcttagcagattctacttcagattgtgctgaattagtatttccttgattttttggaaaatattcatagctgtaattgtttcatacatactgtacttcgagccactgttttcatggaaagagtaggatgttaaagatatttattttctctggacacaattctttggctgctgtaatcaaacacaatttaattaactcaccattggcaaatactttccttgcttgcttaacaaatgagccatttggaaatttacttcggttgcagccctatttccatttttaatttttggcaagacattctgctctgaggaggtatatcttgttttacatttgcccattttcctgctcattgctctcatgagttgggagtgaatgctgtgtggcagggcatatcgggatattgtgatgagtgcttagtctagtaatacttcctatattgtattttgctggcacagcttcgtgatgcttttacataataaagtactttgacatctaactagatttaaacaatctacagtccactgtgacttacaagtgtgacatcagagtacttctgtttttttgacgtgatagtcactggtaaaatagttatagtatggcaatactcatgacacttgaaatgctgttgagtaaaccgtgtcattgagatttgtggtgcactgagagtataaagggatgagggcaccaaatatgatctctgtagcaactacccaagtctgctgttgtatcaggaaaacagctatagaccatgtgtaaacaaatgagcatggctgtattctaataagactttattgacactgaaattttcttttcatataatttacacatgtcacaaaatattcttttgatttttttcaacgatttaaaaatgtaaaaatcaggttgggcgcagtggcttatgcctataatcccggcattttgggaggctaatgtgggcagatcacctgaggtcaggagtttgagaccagcctggccaacatggtgaaacctgaaaatacaaaaatagccannnnnnnnnnnnnnnnnnnnnnnnnnnnnnnnnnnnnnnnnnnnnnnnnnnnnnnnnnnnnnnnnnnnnnnnnnnnnnnnnnnnnnnnnnnnnnnnnnnnnnnnnnnnnnnnnnnnnnnnnnnnnnnnnnnnnnnnnnnnnnnnnnnnnnnnnnnnnnnnnnnnnnnnnnnnnnnnnnnnnnnnnnnnnnnnnnnnnnnnnnnnnnnnnnnnnnnnnnnnnnnnnnnnnnnnnnnnnnnnnnnnnnnnnnnnnnnnnnnnnnnnnnnnnnnnnnnnnnnnnnnnnnnnnnnnnnnnnnnnnnnnnnnnnnnnnnnnnnnnnnnnnnnnnnnnnnnnnnnnnnnnnnnnnnnnnnnnnnnnnnnnnnnnnnnnnnnnnnnnnnnnnnnnnnnnnnnnnnnnnnnnnnnnnnnnnnnnnnnnnnnnnnnnnnnnnnnnnnnnnnnnnnnnnnnnnnnnnnnnnnnnnnnnnnnnnnnnnnnnnnnnnnnnnnnnnnnnnnnnnnnnnnnnnnnnnnnnnnnnnnnnnnnnnnnnnnnnnnnnnnnnnnnnnnnnnnnnnnnnnnnnnnnnnnnnnnnnnnnnnnnnnnnnnnnnnnnnnnnnnnnnnnnnnnnnnnnnnnnnnnnnnnnnnnnnnnnnnnnnnnnnnnnnnnnnnnnnnnnnnnnnnnnnnnnnnnnnnnnnnnnnnnnnnnnnnnnnnnnnnnnnnnnnnnnnnnnnnnnnnnnnnnnnnnnnnnnnnnnnnnnnnnnnnnnnnnnnnnnnnnnnnnnnnnnnnnnnnnnnnnnnnnnnnnnnnnnnnnnnnnnnnnnnnnnnnnnnnnnnnnnnnnnnnnnnnnnnnnnnnnnnnnnnnnnnnnnnnnnnnnnnnnnnnnnnnnnnnnnnnnnnnnnnnnnnnnnnnnnnnnnnnnnnnnnnnnnnnnnnnnnnnnnnnnnnnnnnnnnnnnnnnnnnnnnnnnnnnnnnnnnnnnnnnnnnnnnnnnnnnnnnnnnnnnnnnnnnnnnnnnnnnnnnnnnnnnnnnnnnnnnnnnnnnnnnnnnnnnnnnnnnnnnnnnnnnnnnnnnnnnnnnnnnnnnnnnnnnnnnnnnnnnnnnnnnnnnnnnnnnnnnnnnnnnnnnnnnnnnnnnnnnnnnnnnnnnnnnnnnnnnnnnnnnnnnnnnnnnnnnnnnnnnnnnnnnnnnnnnnnnnnnnnnnnnnnnnnnnnnnnnnnnnnnnnnnnnnnnnnnnnnnnnnnnnnnnnnnnnnnnnnnnnnnnnnnnnnnnnnnnnnnnnnnnnnnnnnnnnnnnnnnnnnnnnnnnnnnnnnnnnnnnnnnnnnnnnnnnnnnnnnnnnnnnnnnnnnnnnnnnnnnnnnnnnnnnnnnnnnnnnnnnnnnnnnnnnnnnnnnnnnnnnnnnnnnnnnnnnnnnnnnnnnnnnnnnnnnnnnnnnnnnnnnnnnnnnnnnnnnnnnnnnnnnnnnnnnnnnnnnnnnnnnnnnnnnnnnnnnnnnnnnnnnnnnnnnnnnnnnnnnnnnnnnnnnnnnnnnnnnnnnnnnnnnnnnnnnnnnnnnnnnnnnnnnnnnnnnnnnnnnnnnnnnnnnnnnnnnnnnnnnnnnnnnnnnnnnnnnnnnnnnnnnnnnnnnnnnnnnnnnnnnnnnnnnnnnnnnnnnnnnnnnnnnnnnnnnnnnnnnnnnnnnnnnnnnnnnnnnnnnnnnnnnnnnnnnnnnnnnnnnnnnnnnnnnnnnnnnnnnnnnnnnnnnnnnnnnnnnnnnnnnnnnnnnnnnnnnnnnnnnnnnnnnnnnnnnnnnnnnnnnnnnnnnnnnnnnnnnnnnnnnnnnnnnnnnnnnnnnnnnnnnnnnnnnnnnnnnnnnnnnnnnnnnnnnnnnnnnnnnnnnnnnnnnnnnnnnnnnnnnnnnnnnnnnnnnnnnnnnnnnnnnnnnnnnnnnnnnnnnnnnnnnnnnnnnnnnnnnnnnnnnnnnnnnnnnnnnnnnnnnnnnnnnnnnnnnnnnnnnnnnnnnnnnnnnnnnnnnnnnnnnnnnnnnnnnnnnnnnnnnnnnnnnnnnnnnnnnnnnnnnnnnnnnnnnnnnnnnnnnnnnnnnnnnnnnnnnnnnnnnnnnnnnnnnnnnnnnnnnnnnnnnnnnnnnnnnnnnnnnnnnnnnnnnnnnnnnnnnnnnnnnnnnnnnnnnnnnnnnnnnnnnnnnnnnnnnnnnnnnnnnnnnnnnnnnnnnnnnnnnnnnnnnnnnnnnnnnnnnnnnnnnnnnnnnnnnnnnnnnnnnnnnnnnnnnnnnnnnnnnnnnnnnnnnnnnnnnnnnnnnnnnnnnnnnnnnnnnnnnnnnnnnnnnnnnnnnnnnnnnnnnnnnnnnnnnnnnnnnnnnnnnnnnnnnnnnnnnnnnnnnnnnnnnnnnnnnnnnnnnnnnnnnnnnnnnnnnnnnnnnnnnnnnnnnnnnnnnnnnnnnnnnnnnnnnnnnnnnnnnnnnnnnnnnnnnnnnnnnnnnnnnnnnnnnnnnnnnnnnnnnnnnnnnnnnnnnnnnnnnnnnnnnnnnnnnnnnnnnnnnnnnnnnnnnnnnnnnnnnnatagtcatatattatataaatatataatatatagtcatatattatataaatatataatatatagtcatatattatataaatatataatatatagtcatatattatataaatatataatatatagtcatatattatataaatatataatatatagtcatatattatataaatatataatatatagtcatatattatataaatatataatatatagtcatatattatataaatatataatatatagtcatatattatataaatatataatatatagtcatatattatataaatatataatatatagtcatatattatataaatatataatatatagtcatatattatataaatatataatatatagtcatatattatataaatatataatatatagtcatatattatataaatatataatatatagtcatatattatataaatatataatatatagtcactttactcctaaatatatattatatagcatatataatatgctatattatatatcatatataatatgctatattatatatcatatactatattatatatcatatataatagtatatgtatatttaggaggaaagcgattctggaatagagtgtagaatttgtggattatcagcctgagaagggacaaagggcattagggcatcatttacacattttgagggtgttagaacagaatttggttatcatggattttcagatccactaatgtttactttccatttaaggcacatcaaatcaagagatagtcagtacacataaaagaggagattgactttatgtatttatcaaatatttcacaaatataaaatattgagcatatcatgttttatttatttatttatttatttatttatttatttatttattggtgacagagtctccctctgttgcccaggctgaagtacagtgacatgattgtataatagctcactgcaacttcaaaatcctggatttcaggtgatcctcctgcctcagccttctgagtagctgggactacaggcttattagctgtgttgcctggctaatttgtaaattttttgtagagacagagttttgctttgttgtcaaggctggtcttgaactcagcttctggaaatccttgtaccttagcctcccaaagtgctggaattacaggcatgagccacagttcctggcctgttaccaagtattttttaatgtttactagtttgatgggtaaaaatgatatattattgttttaattagcatattgtactcagaatttagtctgaagatcttttcatatatttattagctgtgagaccttggctatttcagcaagtattttttgagtaatttctctttagcagtatgctggagattgattagggataaggaagaagtgtaaggcctgattcatgcctctcaggaataatctacctggggagatatgttatatgtactacagcaaaataacatttcaaggcagcttttacgtaattgcagctttaggggagtagtggagagttttaaggggtaacagggaggaatgatagaatcagttttgcacatgttaagattgagttcttgactacattgcattgaagataggtcctttgaaaggtttactactaaaagcatcagcaatagcctacttctcatttctagcatagagttacataaggatcattgttaccaacaaacttactgattatattatatatattacccttgagttaaaaaaagtctgaaatattttagagatatcaacagaactggcttcctggccagaggttgggtctagaaggagaaatttgaaagtagtatcatggaagccactagaaaagccaggagatgggatcagttactgacagatttagagaaagaagagctggaagccaagggagtctaatgatgcccagtgagggcaaaggcagtaggactctttggagattatccaatagtgttttctactttactctagttttcattgataagggtcttgagagttccaaataaattgggagccgacgattgtgcgtgtgtgtttggaatccttggcaggaatcattgcagaagagatgccattggggctcagttttctactttgctttttgtgggggagcaggtggatctttctggcaagagtgcctcagtggctactggtcttactatgtctgaacttattcctcctgtatactccaggtgcccagggtgttgccttcactctgttcctagcaggtagcaccctgttgttgcttcctgtgggagtgagggcttaggcaggggtgtctgctcaggtgcactagccaagcttctgttagttgcttgtgggcctttttctggcctttctgcttttgtgccggagttcctgttcacactctttgggatggtgcccttgaaggcccttgagcctgctctgggatgctatttccctttttagcccatctccagctgttttctactttatggggattcttcacagcttctggccgcctgttatttttttagcatggctgtgtaatcactggctatttaaaaaaatatgatttatattatttctagggtttggtgagaaaaaacggggaaggaggcactgtactctttactcaattggctgtctcgattttttttgttaacattctgttcagtgtctctcctgatatgcttgtaggctttattcatactgttttagaaagatttcatagtgttcttggactgagcagttattttgatttattaattttatttttgatacaaagtcttgctctgttgcacagtgcagtggtgtagacgtggctcactgcagcgtcgaactcctgggctcaagcgatccttctgagtagctgggaccacaggcttgtgccaccacgcccagctagtttttaaattttttgtatagatggggtcttgcccaggctggcctcgtactcctgggctcaagcaatcctcctgctctgtctcccaaagtgctgggattacaggtgtacaggtgtttgatttaagacttaattttgtggtctatcctagcctctttgaaaataaagtttatttcctataaaccaatagaaaacagtcataggatatgagcaggtaatggtcttattcacggcaagagagatgcaaaataaaattgtattgaaaaactgctttttaaaaaaaatctaagttggcaaggatcagaaagtttgattaaacaatggtggctgtggagtagagaaataggcgttgctggtgagaatccaagttggtacaacctctgtagaaggcagccaggcagtatctatcaaaattacagatgcatataccctttgacccagcaattctatttctctggatttatcatatctgtctactcatacatgtgtgaaatattttatatgcttatgtaagtgatagtataagatataagtaatgtatatatcttattggagaatgacatttattttttattacttggagaatgatttgtaatagcaaaagatgtagactacctaaagtccatcaatatggtatttgagaaattataaaatggaatgttacacaattgtaaaaaggaatgaagtgcttcatatatggatatataatgacttcctatatattgatgagtgggaatagcagagtagagaggaatatgtcatatgctatggtttgtttaaaaaggggttgaacatatgtttgtatatacacagaatgtctgtggaatgatgcccaagaaactgtgaatgttttctctgagttgagaaggtggttagaagatgggatgggaaggagattttcactgtctatcctttgaagcttttgtattttgtaccatgaatattactgatacaaaaagaacataaaataaacagaaacatctgacaaattttgttagtagactctttgatagtattgtttctcgttgttgcttcacctggtgggaggaggaggttgattccaaaatcaaattttgttcttttgaaaattcagcattcatgtacttaaactcctagagtaaaattgcttgcttttaagttaccacacaaaaaaagtaagatactggtctatttaactgagaacaaattgttatgattttcatttcttttgatctggtgtcatttttttcctgttaattttaatgaagcacagagaaggaaaattgagtacatggtagagccaggaggacccatatttaaattgctgtcagcaaaccaacactctttgaactaacccactttcatccatacagttagaggtacttattcagtacactaatattagacctacaatcctaactgctaattagcatgagtcccctgataaatagcacactgtaaacaagtagtcaaggtcttttttactcgtttgtttaaacatatggtttattgaggcatattcagggtcacagggattattggacaaataaaaataatttgaaagctttggctaaaaaggaactagcaatatccttaaggaggtggtggaagacaaaatctgttgtatactcctcagagttaatgaaattaatgcagaatcccagaggacccaagaacattacttattttgcttttattgaaaaagttcaattttgaataaaatctgaaagaaataatttattgggtagctgggagaggtggctcatacctctaattccagtgctttgggaagcctaggcaagagggtctcttgaggccaggagattgagattagcctcagcaacatagcaagacgcccatctctataaaaaatttaaaaaagttagcagggtgtgatggcatgtatctgtaatcccacctactcagaaggctaaggcggaaggattgcttgaattcaggagtttgaagctacagtgaattatgttcatgccactgcactctagtgtgggtgacagagtgagaccctatctctaaaataagtaaataaatttattttggaaaactagtctaagtgaaagaacattctgtaataggacaccgagtaactagaatatgagatcctaatatctcatcatgtttaatatggacgatgaagtaacaatatgtaaaaacaatcctagtggttgtgaaagaaagtacctattagtctgatttgttggcacctctctgggacatgtagattcttttttgtttgtttgtttttgttttttttgagatggagtgttgttcttgttgcccaggctggagtgcaatggcacgatctcggttcactgcaacctccacctccagggttcaagcgattttcctgcgtcaatctcctgagtagctgggattacagacgcctgacacttcacctggctaattttttgtatttttagtagagatggggtttcactatgttggccaggctggtctctaactcctgacctcaggtgatccacccacctcagcctcccaaagtggtgggattacaggcatgagccactgtgcccggccttgtggttttaattgagcattttatgagattagatttctcttttcttagcatttcaattatactttttttttttttttttttactgttttagtgtttaccctagagtttgtaatctacatttacaagcaatccaagattgcttttaaataatacaataacaacatcaccacttcacagtttgcacaataccttataataacaaagcattcctaattctttctgcctgtctgttgcattttcagttcacatatacattgctgtccttcatttcacttcttttttttttttttttttttgagatggagtcatggtctgttccccagactgaagtgcagtggcatgatcttggctcactgaaacctctgcctcctgggttcaagtgattctcgtgccttagtctccctagaagctgggattataggcgcacaccaccatgctgtgctaatttttgtatttttagtagagatgaggttttaccacgttggccagcctggtcttgaactcctgacctcaagtgatccgcctgccttggcttcctaaagtgctgggattataggcatgagctaccacacctggcccaaaagtttttaatttgatgaagctcagtttataaatttttttcttttatgggttgtgctttttttgttgttgttgttgaaatctccatgcaccaccacacctggctaattaaaaaattttttttagagacagggtattgctatattgcccaggctggtatctaacccctgtcctcaagtgatcctcctgcctcagcctcccgagttgctgtgattacaggcgtgatccactgtgcctggccagaaaatattttatttttaatcaaagtagtatatggatgtgattttgaaaagtcaactaatatgacaaacttaatataaaaaactgctctaccaccctccccactccagagtccttttccacaggggtggccactttctttttcttttttgttttgtttttttgagatggagtttagctcttattgcccaggctggaatgcaatggtgcagtcttggctcactgcaacctccgcctcccaggttcaagtgattctcctgtctcagcctcccaagtagctgggattacaggtacctgccaccatgcccagctaatttttgtatttttttttttttttgagatggagtcttgctctgttgcccaggctggagtgtagtggcaagatctcagctcactgcaacctccacctcccaggttcaagtgattcccctgcctcagtctccctagtagctgggactacaggcgtgtgccaccacacctggctaatttttttttgtattttagtagagacggggtttcaccatgttggccaggatggtctcgatctcctgacctcacggtctgcccgtcttggcctcccaaagtgttgggattataggcgtgagccaccgcgcccagcctaatttttgtatttttaatagagacagggtttcatcctattggtcaggctggtctcaaactcctgtcctcaggtgacccatccgccttggcctctcagggtgctggaattacaggtgtgagcgaccgcgcctggccaccatttaaaaatctataagctgttgctttttgctatttacctccttatttatttaatttgagacagagtttcactctgtcgcccaggctggattgcagtggcacaatctcggctcactgcaatctccacttcccaggttcaggtgattctcgtgccttagcctcctgaggagctgggattatgggcatgctccaacatgcctagctaatttttgtatttttagtagagacgggttttcactatgttgaccaggttagtctcgaacttctggccttaagtgatccacctgcctcggcctcccaaaatgttgggataataccacacctggccctacttccttatttataactaataaatttttactgttttttgatttactaactttacatattttctattgagcactacctattatggaagatgaaggtttagcactcgtagaccaccaatcctgctgctgcttctggaatcttctcagtagagttaactcacaatttttggttaaatatttagtatttatatcatagtgattatataaatgttgattactgttgaatttagtcgtatactatgattacatgacctttcttgaataacttgtttttcccaaagtttgtagtctatacgaaattatttactttattctccatataactattattcattgcttccaaattctcctacagtattgtaacattccacagaataaggttagacgcatcaagtgaaccgtcagttctatgctttcttctcctggttgatccgggagctgttttgactcttgtcccagcctgctccatggctgtgattctctataccactgccctgtgttggatcccctgtttcttgaatttcttcctttttcttggcttgttccctcatgtggaaggagtacatcttgtagcttccttgtaggttcctgggaggtcttttgaatcttggcaaatcagaaaatgtttttattctactttcaaacttaattggtagcttgaaaagctatagatttctagttaaattaattcctcttggccaggctcagtagctcatgcttgtaatgtcagcactgtggttgaagccaaggcagaaagagttcgagaccagcctgggcaacacagtgagaccccatctttaccaaataacagaatattagctgggctttggtggcatgtacctgtagttccagctacttaggaggctgaggcaatgaggctcccttgagcccaggagtttgaggttacaatgagctataatcacgccactgtactccagcattgtactcagcaacagagtgaggccctgtttcttaaaaaaaaaaaaaaaaaaaaaaattttaatgctggtactagctatgaataaatccataatattttttgccagttttaaaatcttataaatgaaagcataccatatctattaggtagcttgcttttttttttaaacattttatatttttgagatgtatccatttagctctgtttcattcattttcactagtgtattatgtccccatataattttgatagcttaaaatactattgtaagttaggaatttatatatttcagagaatttctttctttctttttttttttttttttttgagacagtcttgctcttgtcgcccaggctggagtgcaatggtgtgatcttggctcactgcaacctctgcctcctgggttcaagtgattctcctgtctcagcctccctagtagctgggattacaggcatgcaccaccatgccagactaattttgtattttgagtagatcgcctcaggtgatctgcccgccttggcctcccaaagtgctgggattacaggcgtgagccacagcgcccggccttcaggatatttcttttatagcattttctaattgggcttaacaagccctactttaagaaattaaaccttatgattagctgtcttaatatagaggcttaattgaagctgaattatgattcagttgaagttgaattgagttattggggcccctgtccccttgcaggaaggatgaaagtagtggctagcctcagctttaggggcaggcgatgaggagccagatcagtatttctatctcagattcagaagacccagctgtccatgtgcatcatcggggaagcatcttgctctcagaataagcagctcaatccagctcccaaattctgaccgtggcttcagtgcctttgtggaatgagaagggacatgaggaagaaagtgagtcactaatacacattctcacctgacctgagccgcctttggtccctgaggccatgtagtttcctttcattgtgatggtaattttaaaatagtataatgtattatttatcttatcaccattttattattcaatgggagaacttttctgaacaaatcaagataaaacatgatctaaatctatgttaagtgtgatttaagggagacagtgattcatatttgtaactagttttcttcccttagtgactgagaacaaccaatactgacttttgaagagcctcgtggatactaattatttattcactcccttgttccttcaacatactgtttagggaattttttacatgctagtctagacagtgggcatagacagatgaatgagataattcctgtcgtaaaaatgtgcatggtttaggggaagaggcatatcaactaaaactgcatatgtgccctacagcagaatgacagaaacattaaatgtgattcctttgtaattgggatctctttcacttgaagttggtaattcaggtttgtccctatgacccccataagtagaagtagcacatggtaattacttgagctatgttcccttccttgtacattcaagccatccagatttctgtatttctttgtcaccattgttttggttgtaaaacagcttcattttcagactaattataagttaccattattatgattttgctttgagacattttcttgggtagagctatgcccatcctaagatacatggtacaagtacaatatagatttggatttttgtgtttgtattggctaagacaggtgttagctccatatttctttttttttttttttgagatggagtcttgctctgtcgccaggctggagtgcagtggcgcgatcttggcccactgcaacttctgcctcctgggttcatgtgattctcttgcctcagcctcttgagtagctgggactacgggtgcgtgccaccacgcccagctaagttttgtatttttagtagagacggggtttcaccgtgttggccaggatggtctcaatctcttgacctcatgatctgcctgcctcagcctcccaaagtgttgggattacaggcgtgagtcaccatgcctggcctagccccatatttcttgtaactttgtatctgatgtctaatatatttataaatacagaaatgtgtgattttctttagtaagtttatagtttttttataggtagacaaagcatgatgacttttgaacaagtttaaagtttttatttttattttttataggttgtcttttggaaatgcaggtttaaggacaaattatctgcttaagctagaagatgggatcgaatagcagcagaatcggcgatcttcctaaaaatgagtacttgaaaaagttatcaggcacggaatctatctctgagaatgacccgttctggaatcagcttctctcattttctttccctgcaccaactagcaggtaagagattgcctggagattgaaaatttgaatagagggccatatcaacttgtgtggtatgctgattaaaaaaaaatttagaaatgttctgtctatctatctagtctatctgtcatacatagatcagtagaaaatccaaaagatttgaaagtagaaaataagcttttctttttacccaactcagtagccacctcccttctctagaggttatcactggtagcagtttattttgaatcgttctagagataatataggttacttaagcatatatcccatatagtttcacaaaattgtttaaatacaaatggtagcatactacacgtactgttctgtcccttgcctttttttccacagttaagtaaaatatatcttgtatatgtagcacatttgcaacttccttattctttttaatggctgtggagtatctgtagaatatatttaattggtttttctgttgatgaacatttagattgtttccagtctttgttgtaacagttactgccgcatacatcatttttcatacacacaatatatctttagtataaattccttgaagtagaattgctgggtcaaagtgtatgtgcatttgcaatttggtagctatgccaaattgtgcaccatggaagttgtagcaatttgcatacctaccagcaatgcatgagaggtgtgtttccccatatctttgtcagtttgatgcattttagacctttgacctctgccagtttcagaggtgaaaaataatatctcatatttaattctattacaaaaactgtcagacaataataatgaagaatgaatagaatattgaattcccatacactcaataactagatttaaaaattttttatttactttttaagagctttattatgataggcagaatagtagccccccaaagatgtccatgtccttgtctgcagaatctgaatatgttacattacatggcaaaggggaattaaagtagcaaaaggcattaaggttactaatcagctgaccttaaaacagggagattatcttggattatctgggcaggcccaaagtaatcacaaggcttcttgaaagtggaagagggaggtagaagagaaagtcagatgtgatgtgaggaggactcagcctgcccttgctggctttgaagatggtagggaggtcatgagcaagaaatatgagcagcttctagaagctggcagaggcaaggatgcagatttccctctagagcctttggaaagggatgcagccttattgacatcctgatcttagctcattgagtgtcagacttctgacctacagaactgtaagataataaatttatgttgttcacaccactaaattttgataacttttgtagtagcaatagaaaaataatacactttttgagatatgtttcatatatcatgtaattcacccatttaaagtgtattattcagtgtttttattcacagaattgtgtaacaatcaccaattttagaacattatcatcccagaaaggaaccatcccatgccctatcccatgcccattagcagacactcccccaaactctagattgcactagcaaccacttatttatttatttattttttgagagggagtctcagtctgctagagttcagtggcgcgatctctgctcactgcaaactctgcctcctggattcaagcaattcttcggcctcagcctcccgagtaactgggcttaacggttgcatgccttcatgcatggctaatttttgtattttttgtggagatgagatgtcaccatgttggccaggctggtctcgaacccctgacctcaagtgattcaccttcctcagcctcccaaagtgctgggattacaggcgtgagacactgcgtccagccactaatttaataactactactaactttgcctcttctagacgtttcatgtaaatgaaattgtaacaataggtggtcttttgtgactggcttctttctttttttttcttctacctttttagagatggggtcttgctctgttacccaggctggtcttgaactcctgggctcaagaaatcctcagcaccccaaagtgctgggattacaagtgtgagccactgcgccccgccgtgactggcttctttcactgaatgtaatattcatacatgttgtagcatgcaccaatacttgcattcctttttttcttttttttttgagacaaggtctcactctgttgcccaggctggattgcagtggtgcgatcgtagctcactatagccttgaactcctgggctcaagtgatccttccacttcaccttcctgagtagctgggaccacaggcatgcaccgccatgcctggctgctttttaaaaaatcttttgtagacataaggtcttgccatgttgcccaggctggtcttgaacgaacacctggcctcaagtgatcctcctgcctctgcctctgaaactgttgggatttataagcatgagccactggacccagcctccattcctttttattgctgagtgatactccattgtatggatatactgcattttgtttgtccattcagaaattaatagacatttggatattgttgagtgatactccattgtatggatatagtacattttgttcattcagaaattaatagacactgggttgtttctatattttgttcattattgttttttaagtatcgtaaagtctttttttttacataaccataataccattatcacacctcacaaaattaacaataatttctgctacccagttcatatttaaatttttccatatttaaattttaattaaatttaaattaaagttgttttaatagtttattacaattaggagccaaataaggtgcatacgttgcacttgatggttcttgtccttaaatgtcttctaatgtagaatataggtgtccacttcccacccttgccactattttttcccttcatgtcatttttaaaacaaattgtgtcagtttttctgtagaatgttccatcttctgtatttatctgattgcttctcacaccttgtaacttgttcttttattccatatatttcccgtaaattggaaatgaggtttaaaagcttgataaaatttaggttaatcatttttggtaaggtattccatatgtagaaaaagtatgttttataccagttatcatgctaagattgatcagagttttgagtgtattttagcatgtattgatttttgcctgaatcacctgttttataagaggttacaaaatggtaatatttctaatttggtcatttctacatttaataactggagttcttctgtaaagaggactttatgtcatcaattaggttatgtaaaatatagttcttactatatttattactaattaaaggtaagcacttcagtttttttctttaccaattttcaggaaggggttggtgtaatcatgacaaagaagtctatacttcccgtttccctttacctcagaggtagagggcctatttctgtcttgagggtaaattcacacacacacacacacacacacacatgttttccagtgtgactaatagcagtcgtttttctttttgatacccagttcagcaagttttggatagtggtccttatggttttatttgcctttctttaataattaaggttgtgtttattttcatatgtttaaggggtattggtatttccttttccgtgaactgtttatatcttttggcaataaattttaatttttttattattattttttattatactttaagttctagggtacacgtgcacaacatgcaggtttgttacatatgtatacgtgtgccatgttgatgtgctgcacccattaactcgtcatttacattaggtatatctcctaatgctatccctcccccctccccccaccccacaacaggccccagtgtgtgatgttccccaccctgtgtccaagtgttttcattgttcaattcccacctatgagtgagagcatgtggtgtttggttttctgtccttgcgatggtttgctcaaaatgttggtttccagcttcatccatgttcctacagaggacgtgaactcatcctcttttatggctacatagtattccctgctgtatatgtgccacattttcttaatccagtctatcatcgatggacatttaggttggttccaagtctttgctattgtgaatagtgccacaataaacatatgtgtgcatgtgtcttgatagcagcatgctttacaatcctgtgggtatatacccagtaatgggatttctgggtcaaatggtatttctagttctagatccctgaggaatcgccacactgacttccacaatggttgaactagtttacagtcccaccaacagtgtaaaagtgttcctatttctccacatcctctccagcacctgttgtttcctgactttttaatgatcgccattctaactggtgtgagatggtatttcattgtggttttgatttgcatttctctgatggccagtgatgatgagcattttttcatgtgtcttttggctgcataaatgtcttcttttgagaagtatctgttcataccctttgcctactttttgatgggggttgtttgattttttcttgtaaatttgtttaagttctttgtagattgtggatattagccctttgtcagatgggtagattgcaaaaattttctcccattctgtaggttgcctgttcactctgatggtagtttcttttgctgtgcagaagctctttagttgaattagatcccatttgtcaattttggcttttgttgccattgcttttggtgttttagacatgaagtccttgcccatgcctgtgtcctgaatggtattgcctaggttttcttctagggtttttatcgttttaggtctaacatgtcagtctttaatccatcttgaattaatttttgtatgaggtgtgaggaagggatccagtttcagctttctacatatggctagccagttttcccagcaccatttattaaatagggaatcctttccccattgcttgtttttgtcaggtttgtcaaagatcagatggttgcagatgtgtggtattatttctgagggctctgttctgttccattgatctatatctctgttttggtaccagtaccatgctgttttggttactgtagccttgtagtatagtttgaagtcaggtagtgtgatgcctgcagctttgttcttttgccttaggattgacttggcaatgcgggctcttttttgattctacatgaactttaaagtagttttttccaattctgtaaagaaagtcatcggtagcttgatggggatggcattgaatctacaaattaccttgggcagtatggccattttcacgatattgattcttcctatccatgagcatggaatgttcttccatttgtttgtgtcctcttttatttcgttgagcagtggtttgtaattctccttgaagaggtctttcacatcccttgtaagttggattcctaggtattttattctctttgaagcaattgtgaatgggagttcactcatgatttggctctctgtttgtctgttattggtgtataagaatgcttgtgatttttatacattgattttgtatcctgagactttgctgaagttgcttatcagcttaaggagattttggactgagttgatggagttttctaaatatacaatcacatcatctgcagagataatttgacttcctcttttcctaattgaatatcctttatttctttcttctgcttgattgccctggccagaacttccaacactatgttgaacaggagtggtgagagaaggcatccctgtcctgtgccagttttcaaagggaatgcttccagtttttgccagtcagtacaatattggtggagggtttgtcataaatagctcttactattttgagatatgtcccatcaacaccgaatttattgagagtttttagcatgaagggctgttgaattttgtcaaaggccttttctgcatctattgagataattatgtggtttttgtccttggttctgtgtatatgatggattacggttattgatttgcatatgttgaaccagccttgcatcccagggatgaagcccacttgatcatggtggataagctttttgatgtgctgctggattcagtttgccagtattttattgaggatttttgcatcgatgttcatcagggatattggtctaaaattgtcgtttttggttgtgtctctgccaggctttggtatcaggatgaagctggcctcataaaatgagttagggaggattccctctttttctattgattggaatagtttcagaaggaatggtaccagctcctctttgtacctctggtagaattcggctgtgaatccatctggtcctggactttttttggtttataggctattaattattgcctcaatttcagagcctgttattggtatattcagggattcaacttcttcctggtttagtcttgggagggtgtatgtgtccaggaatttatccatttcttctagattttctagtttatttgcatagaggtgtttatagtattctctgatggtagtttgtatttctgtgggatcagtagtgatatcccctttatcattttttattgcgtctatttgattcttctctcttttcttctttattagtcttgctagtggtctatcaattttgttgatcttttcaaaaaaaccagctcctggattcactgatttttttgaagggttttttgtgtctctatctccttcagttctgctccgatcttagttatttcttgccttctgccagcttttgaaagtgtttgctcttgcttctctagttcttttaattgtgacattaggttgtcaattttagatctttcctgctttctcttatgggcatttagtgctataaatttccctctacacactgctttaaatgtgtcccagagattctggtatgttgtgtctttgttctcgttggtttcaaagaacatctttatttctgccttccttttgttatgtacccagtagtcattcaggagcaggttgttcagtttccatgtagttgagcggttttgagtgagtttcttaatcctgagttctagtttggttgcactgtggtctgagagacagtttgttataatttctgttcttttacatttgctgaggagtgctttacttccaactatgtgatcaattttggaataagtgctatgtggtgctgaaaagaatgtatattctgttgatttggggtggagagttctgtagatgtctattaggtccacttggtgcagagctgagttcaattcctggatatccttgttaactttctgtcttgatctgtctaatgttgacagtggggtgtgaaagtctcccattattattgtgtgggagtctaagtctctttgtaggtctctaaggacttgctttatgaatctgggtgctcctgtattgggtgcatatatatttaggatagttagcttttcttgttgaattgatccctttaccattatgtaatggccttctttgtctcttttgatctttgttagtttaaagtctgttttatcagagactaggattgcaacccctgcttttttttgttttccgtttgcttgttatatcttcctccatccctttattttgagcctatttgtgtctctgcacgtgagatgggtttcctgaatacagcacactgatgggtcttgactgtttatccaatttgccagtctgtgtcttttaattggagcatttagcccatttacatttaaggttaatattgttatgtgtgaatttgatcctgtcattatgatgttagctggttattttgccctttagttgatgcagtttcttcctagcctcgatggtctttacaatttggcatgtttttgtattttatttctccttcacttatgaagcttagtttgtctggatatgaaattctgggttgaaaattattttctttaagaatgttgactattgtcccccactctcttctggcttgtagagtttctgccgagagatccgctgttagtctgatgggcttccctttgtgggtaacccaacctttctctctggctgcccttaacattttttccttcatttcaacttggttgaatctgacaattatgtgtcttggagttgcttttcttgaggagtatctttgtggtgttctctgtatttcctgaatttgaatgttggcctgccttactaggttggggaagttctcctggataatatcctgcagagtgttttccaacttggttccattctccccgtcactttcaggtacaccaatcagacatagatttggtcttttcacatagccccatatttcttggaggctttgttcatttctttttattctttcttctctaaacttctcttcttgcttcatttcattcatttgatcttcaatcactgataccctttctttcagttgattgaatcggctactgaagcttgtgcatgtgtcccgtagttcttgtgccatggttttcagctccataaggtcatttaagggcttctctatgcggtttattctagttagccattcatctaatctttcttcaaggtttttagcttcttcgcgatggtttcgaacatcctcctttagctcggagaagtttgttattaccgatcttctgaagccttcttctctccactcgtcaaagtcattctccgtccagctttgttctgttgctggcgaggagctgcgttcctttggaggagaagaggcactctgatttttagaattttcagcttttctgctctggtttcttcccatctttgtggttttatctatctttggtctttgatgatagtgacgtacagatggggtttggtgtggatgtcctttctgtttgttagttttccttctaacagtcaggaccctcagctgcaggtctgttggagtttgctggaggtccactccagacgctgtttgcctgggtatcaccagtggaggctgcagaaccgtaaatattgcagaacagcaaatgttgctgcctgattgttcctctggaagcttcgtctcagaggggcacctggccgtatgaggtgtcagtcggcccctactgggaggtgcctcccagttaggctactcaggggtcagggacccacttgaggaggcagtctgtccattctcagatctctaactccgtgctgggagaaccactactctcttcaaagctgtcagacatggacatttaagtctgcagaactttctgctgccttttgttcagctgtgccctgcccccattggtggagtctacagaggcaggcagttctccttgagctgcggtttgggcttcccggctgctttgtttaggtactcaagcctcagcaatggcaggtgcccctcccccagcctcgctgccaccttgtagtttgatctcagactgctgtgctagcagtgagcaaggctccgtgggtgtgggaccctccgagccaggcgtgggatataatctcctgatgtgccgtttgctaagattgttggaaaagggcagtattagggtgggagtgacctgattttccaggtgctgtctgtcacggcttcccttggctaggaaagggaattccttgcacttccctggtgaggtgatgccttgccctgcttcggttcacggtccacaggctgcacccactgtcctgcacccactgtctgacaagccccagtgagatgaaccaggtacctcagttggaaatgcagaaatcacccgtcttctgtgttgctcatgctgggagctgtagactggagttgtttctattcagccatcttggaacctccccccaaattttaatttttaactttattgtatacaattggattgggccttagaagtttaccttagtttaagccaggtgtggtggctcttgcctgtaatccaaacaccttgggagaccgaggcaggtggatcacctgaattcagcagttcaagaccagcctggtcaacgtggtgaaaccctatctctactaaaaatacaaaaaattagccaggcgtggtggcgggcgcctgtaatcccagctactcgggaggctgaagcaggagagtcacttgaacccgcgcggcagagcttgtggggagctgagatcgcgccattgcactccagcctgggcgacaagagcaagactccatctcaaaaaaaaaaaaaaaaaacgaattttaacttagtttataattaatctgatggcttggattagatgtattttatattgaagtggttacttattcttgcttctgagatccttggaaaattaaaggtggctgtggattggtgagaaaggtcatactggggatgagctatagcatcaacaacttttgaaatcatttccttaatccttgcagaattatcactgagtactgctgctcatgtgatagtgatacgacttagaggaaaagagggcgaaatggagagcatgatttattgtccaaaataatttttcttttcacttatgtaaattctaaagtaatttataaagctattccaaattatagtatatggtttttacattgaaatatactaaagtagacttaactaaatagagatatgtaccatgtttaaggaataaggagactattgtaaaaatgtcacttcttttcaaattgacctatagattgaagacaatttgaattaaaattctgaaagccttgttttggaagattgggggatcttgataagtttattctgaaatgtgtatgaaaaagtataatgaacaagaataactaaaatacttaagaataagaataaatgtatgtgtatgtacttgatttatgtggagctggcatttcagtggggaaaaagatgaacttcttaaaaaatagtgacgggaataatttgttagccatttttgtcgacctgtgccagtgcctcacagtttaagttattatggctttatagtttgttttgttaattattatttttactcaaattttattttattttattttatttttttaatttttgagacagagtcttgctctgtcgcccaggctggagtgcagtggtgcaatctcagctcactgcgacctccgcctcccaggttcaagcaattccctgcctcaggcttccgagtagctgggattacaggtgcctgccatcacgcctggctaatttttgtagtttagtagaggtggagtttcatcatcttggccaggctggtcttgaactcctgacctcctgatccacctgccttgacctcccaaagtgctggtattacaggcgtgagccactgcgcctggccaccattctcttttcttaaatcacccaggtgatttaagagaaacgtataaagggatcttagaaagtgaaaaaactgtaaagtaaataaactgcattgtaaatctgtgagagtatatttataaaggtttcttcccacccccaccgccacaagtgagtttacatgatagaggtttcatttgtggtgttgcatatacttttggtctgtcactttctctttggcactgccctgctcctcactgatggtatttgatatttgaccttgggactgagtaggctttgaggtagcaggtgcccccttgttgacagagtcaggggccaaaattacctagttcatgaattattcagggctaagatgaatctcagtagaggagactctgaatctagataattctgagattgttcactcttggaattcgttagatacatatgtgccgtcttcaagtaaagtccatttttgtagccaaaaatcgatgtttgctgcaatttttagaaatactaataaggcctttaggacgaatctaatccttccttactattaactgtttttagcatcagagtaatcagattttgtaagagtttccaggtgtggttctaaaatctttcttaaattatttaatagtttttattttttcaccctgttaaaattagttgtgcagcaaagatctgaaacaaaatgaagaataattaaagactaaaggttaataatatacactgtttttttcctaaatattttaaactacttatatgactgattttatacatgtttctaaactacataatagcaacaaaaatgaaaaacagacctgtacttattattttttggttcataggcatctgaggctatggtgtgtgtgaacataatcgtgtgtcatgcttatcattgagaactgctggaccagcatgacttatctctgagtatcaaactgttattcatttatttgtttctcaggctataatagttagctggatatatgatgtctcttgttcttaaaggcttataatcttttttttttttttttttttcagacagagtttcactcttgttgcccaggctggagtgcaatggcatgatctcggctcaccacaacctctgcctcccgggattaagtgattctcctgcctcagcctccccagtagctgggattacaggcatgtgccaccatgcccggttaattttgtatttttggtagagatggggtttctccatgttggtcaggctggtcttgaactctcgacctcaggtgattcgcttgcctcggcctcccaaagtgctgagattacacgcccagccagagcttataatcttatctgtaaatcagcaaacaagtatggtgaaatatgataaagggtgttatagaagaattgcattttatgcatatgcaaacaaatatgcacatatatcccttctctttttttgataaataatagcatgtatattatacacactttttcactttgtgctttttttcatcagttatatcttgaagagccttctatatattaacttcctcactctttttaatgggggggcatatataccaaaattaattggatttaccatttgggttttaccatttggattgcttccagtgttttgttattacatataatgtagcagtgaatagccttatacaagctgggaacggtggttcatccctgtattcccagcattttgagaggctgaggcaggaggatcttttgagactaagagtttgagaccagcctgggcaacatggcgagacccccatctctacaaaaaataaaaaaattagctgagctcggtggcttatgcttgtagtcccaactacttgggaggctgagtcaggaggattccttgagcccaggagttcaaggttgtagtgactatggtcaggccaatgctttcgccagcctgggcaacagaacaagaccctgtctcaaacaacaccaccaccaacaccaccgctaccaccttatacatatgggtagaagtgacttcttgtactataaaggaaacgtggccagatgacttctagtaatgcttccagtttgtgttgagaggaatgggaatcaagtgtaataggttgggaatgtagaaattgcttcccaacatagttcatgatgcttcagggtaaattgataaggctgcttgggtctagagtggtctggggctctgaagggtgtaggggctctaactatgaaaggctgaactgggaaataaaaatatgtccacctgttacctatttttggcacacttgttagaaagctgaggattagaagtagggtcccttgtaggctcttgttgagtggatttggagaaaacattgtttcagagacattatttttttaagtagggtgagtaggtggaaagtgcaggaagaaaaactagggcaggaaaacaaaatctgagacatctgcagcaatatacctgtgatgtgctgaaggtctgaatttctattactgtgtaggaaatggaaagtcctacatctcagtaagtgtgtgtaaccagctaacagcagtatagagaataatatctttaaaaagttcttttgttttaaattaacacctgatttgagtgttaatacttaatgagcttagagttccagatttgagagcagctctgagcagtatagcagcagcctgaatactcttctccagaggaattgttttgctaaaaggtgcagtgactttgggtgaagtgtgaagaatggagaccatgtagcatggcagggggaacatggattttggagccaaactgaccttgcctgagctccacaactgactagtttgtgaattcaggaaagctgcttaatctcactgaacctgttgttgcttttgtaaaatggaaataataacccctaccatgtagattcatagggatgatgaaacactatcatgcatgtaaagtgtctgactttgctcttctttcaaggagtaattacctattagtttacaaagacctaggactctgtcttgagagttagtctaaaatatttgaggaatgaaaataagcagcagaaatttaaccaattttctgatgaccgctttatcttgatgattgaaagtcctgtgcctcttttgaactaattgttctgctgttttaaaaattaagccagacagtgattatagtaatagtcatctttgtgtataagcaatctaccttttttttttttttttgagtcagagtttcgctcttgttgcccaggctggagtacagtggcacgaccttggctcactgcagcctctgcctcccaggttcaagtgattctcctgcctcaccctcccaagtagctgggattacaggcacatgccaccatgcctggctagttttatatttttagtagagacagggtttcaccatgttggtcaggctggtctcgaactcctggcctcaagcaatccacccacatcagcctccaaaagtgctgggattacaggcatgagccaccatgcccagccacaccctactttttataaaggctacttttcagaaaactttactgtgttacagaaattgtattatgtgtactgagcactagatggtgctcatataaggcaaaaagggcagctcttggcacagtcacttaaaactaatttttctaagtaccaaagtaatgcatgttcatttttaatactttaaatacagaaaagcaccaggaaggcaaaaaaaaaaaaagataaaaataataacaaccaagagtaacttgttaacattatggtgtatatcgttttaattctctctcatttttaaaatttttttaattttttttttttttttttttttgagagacccagtctcactctgtctcccaaactgtagtgcagtggtgtgatctcagcttactgcaacctccacctcctgggttcaagcaattcttctgcctcaggctcctgagtagctgggactacaggtgtgtgccatgctcggctaatttttgtatttttggtagagacagggttttgccatgttggcctggctggtctcaaactcctgacctcaggttgaagcaggagaatcgcttgagccctggaaacagaggtttcagtgagctgaggtcatgccactgtactccagcctgggagacagaaagaaactccacatcaaaaaaaaaggaagtatttttttgattaatatacctaaaaaaatagttatggaatgtcttctagttgctagggactgtttttaaggactaaaaacatgagtgacaaagtccctgctctcatgcagtttatatgttactagaggagatgagcgataaacaagtgaacaaataaatatgttaagtcatttctggaagtgtcaagtgtaaggaagaaaagcgaagcggagtgaggtgatggagagcaatagctttaggagatttctttagccagagagtctctgggaaagcagcatttgagcagagacattatgatgccagggagtgagccatgcatgttttgtggagagtattccaggtagaggggcagcgagtgtaaagaggctgaagtggaagtaagttctgcttgttagaagagcagcaaaaggcccgtgtagcagaacagccaacacgaaacaaataacataaggacttggctgtgtgaaagatcttataagttgtatggtattccagagatgagcctgtttcattatcactatttgggaattgagtctagtctgctataatttactaactatcctataatatggaaagattttattcatgttttttttattgtggtaaaataaacataaaatttaccttttcaaccattttttaaattattgttttttcgtctggtcctcttgactcttgtaaccttttcaaccatttttaattgtacagtttaaagtacattcacagggttgtgcaaccatccccaccatccctttccagaatattttcatcacctcagatagaaatgctatacctattaaacaataacttcccatcctctccctccagtttctggtcacctctatttttactttctgtctctatgaatttgactactctgggtatgtcatataagtggaatcatacaatatttgtctttttgtgactggcttatttcatgtagcataatgctttctttctttctttctttcttttttgagacagagtctctctctgttgtccaggctggagtgcagtggcgtgattttggctcaatgtaacctccgcctcctgggttcaagttgtcctcccgcctcagcctcccaagtagttgggattacaagtgtgcaccaccatgcccgctaatttttgtattttttagtggagacggggtttcaccatgttggccaggctagtcttgaactcctgacctcaagtgatctgcctgccttggcctcccaaagtgctgggattataggcttgagccactgtgcctggcctagtataatgccttcaaagttcataatccatgatgtaatttccttccttaagtctgactaattacccattgtagttatataccacatcatataatgttttctaaacttcagtttgctgtactcttatccttttaaagggcttccatttctctttagcattgttagtttccacttgtcactttgacttttctttcagggatttttcttacatgataaaaaatttaattctactgagataaatgataaaatagaatgataaaatgatataatgataatataattctgctaaaaggattcgctaacgtaagcatcattgttactttaccagttatttattgagctcactgtttgtcagatgctggacccattgctgtagacacctccatttttttagttctgttattgttattcaagtctattattcccacgtgtgagagaactgaggcctaggaaggttgtctaaagccacacagtgagtagcgagtaaggaccagatttaatttaaaccaggtttatttgtctaagtccagagaggaattccgttgaccatcatgccacactgtctccttgggaagcacaggctaatctgagacccagtttcatgtaagtactaaagagctgcagcattaaatcgtatggtaatctttgagagtagaaccaccagattatatgttcacattttcaagcatttttcaaagctgcagatcataatcagaggaatcttgagtgccatcatttacagtgatcacacaagctgatgggtaatctgtttagtattttcaccttgccttgagtagagtgtatcttctctctttttaagcagagctgcctgaatgatcctttgtcaaagtttcttagtctgtttcctcagttgacacacaggaagagagacttttgtttaattaggtcacgtttttaactgacagaagcaagtgattgtaaaattactttcttctttgaatctttgatgcctgtctctgtttctatatttttaggctctttggcacactttatgttcaattttattagaacttttcaagttgaaaaatctgctctgttgtagaggtgggcctgggatcgctgctaaaccatcttctaaattctgttttaactttttctttgtaggtttgcttggttggtgaccaaaataatgtactaggctgttttactcagggaataaataatttgagacttttcttggcatcttattatatttttcaaattgagggaccacaagaagttcagtttttacatcttgagtcaaaacctttatttcccattctttcatttatacctttctatgcaaaaatcattttagaagatgcttaagttttcccaggattaatcagtcccttaaactaaaagcttaaatgggggaaatatatcctttaaagcattaaagtaaagggacatgtaagttttactgcaggtgcacccttgattcctcttctttctcactgtgttggttggaattttttttttttttttttttttaagtcaatgtttttctctttcttgggaaaataaacaccgtattatctagcatagtagttgctgacattttgacattttaatagttatatttcctttcattttggcagttgaatgacagcatatacgattgtctgtgaatcacatgaatgtaaacacctttttggttctgcatgggtgcgttaaaaattgctataatttatatgcagtttttgtcctttgactttttcctattaataggtcctcttaaaacattaaccttcccacagtttaaccactgaattggctgattcttgttagttttgtgaatgatttctgtaattctctttgctaaggtaagggggaaaatgtcttcagaagtgcttctgtcctttcctgaatcgttacttgttgattttttcaggttatatctttgactaacattatatatttatcagaatttgtatgttgttggctgaaattgacatcattaatataaaatgtcagttttgaaagaattttatggcggaactttcagctgaagggactaaggattttcagtgtttatgttatgaaacttacagtttgattgttcagcaaacctgtgttcagaggtctgttataacttctcccccaacaatttttttgcctatctgcttttcttaaaaatatttgagctattaatttctcacttttcattattgagattcatatatgagaacggtgtgcctaaaagtaaaataaaaccagtctaaattacagaaaactgtgaagtagggaatacttaatttaaaattttagcttcccgaccacactatagtttatgatttcatagcagttacaagaaagtcgtctatcatcttaccattttccttattagatttaaaattttgttttcttccaattctttataattcacataatttttgcatgattggaattataatgtagatatactttttataataatttatgtgtgacacaacttcttttaggaatatatagaaattccaactagttgctggagtgtttctaggttgatattatgtgggtttgccttaagagtatctcatttaatattattcatattgaaagagtattaatctggaagttaaatatgtttattcttataccgtgacattggacaagttactctgcttctctatttctgtcacttgtaaagtgaggatactcccatttcctcggtcaacttctcagggtttttaaaagaaatcaaatgaaataataaaggtgaaagaactttgaatagtgtatataggcctgtacaaaatgcaagttatttcagcaaatttatttgcatatggacaataatatgctaacatctttaaacacatttcttttgtagaaggttaaataatactttttctaaatcccctctcccttgtcaaaatgatttctttaaagtataacacaaaagtcagtttcaactcaatttgtttaattttaattttaattttaatttttttgagacagggttttgctgtattggccaggctggagggcagctcattgcagcctccacctccagggctcaaggagcagctgggactacaggcactctaccatgcccagctaattttttttttttttttggtagagaaaaggtctcactatgttgtccaggcttcaactcaattttagacaaacagcccccaatcctgaattagtaaatttcagatcagtgaagtctgctaaatgtatataataagactttttttttttttgaggttgtggtgttattatacaaccaattggtaagcttttcttctaagagtatatattattcaacttcttatttttttttaaccttaatccctgaggaccaacaccatggcctggcagtgtccattggtacctcttataatacttaaaaatccagtgaccgggtactgtggcttatgcctgtaatcccagtactttgggggtcaaggcaggaggattgtttgaggccaggagttctagactagcctgggcaacataatgagactccattgctacaaaaaaaaatttgctgggcatggtggcacacacctgtagtcttggctactcgggaggctgaggtgggaggattgcttgagcccaggagttctaagcggcagtgagctgggatcatgacactgtaatccagccttgggaatgcatcgagaccctgtctctaaaacacacacacacaaaatccaaagtgttcagatgaagaagaaagagacagatgagttagtagaaaagcagattgagatgacaaaggaaaaaagtgttggatgatagaaaccactaaagaggcacaaatcgtttctttaggtactacgtataggctccacgacctaagtcacagaacatcagctgagttagcttaagtgtgctgcttctgttgaccccagttgtgagtatttcacttgcaaactgtagcctgcctgacctgctacaccaattgaccaacatattgtaaatacctcttgcatattttcatatgtgacaattatcaggactaggtatttagtttattagatggtccatgttatatatttatttttattgtggaaacttgaattcttgaactacaggcttcatatgaaagaggctttttttccctaccaacaaatattttttccttattaatttgccaggatgggaaaactaattgacatccaacagtggtactctgttgatgaatgaagggatacatgctttaacaccaagctctggtctttttattccatcattcatgagctgtggtggggtctcccctgagttgtggtggagagcagatctaccatcaaggccatggttgtttctcttccatcacctcctgaattgtggctgatgacatttggaagcattttctgcttaagcagcaatatagtcaatcatgtgtctttataatgaacaaatataatccagaattttttatttaatatttgctaagtttttttcttttttttcttttttttttttttttgagacagagtctcactctgtcacccagactagagtgcagtggtgcaatctcggctcactgcaacctccacctcccaggttcaagtgattctcctgcctcagcctcctgagtagctgggactacaagtgtgagccaccatgctcggctaatttttgtatttttagtagagacggggtttcgctatgttggcaggctggtcctgaactcctgacctcaggtgatccacctgcctcggcctcccagggtgctgggattgcaagtgtgaaccactgtgcccagcccacatttactgagtttttactttttctgtcacaactgaatatttctgtattttgttgactagaccattcttgaagtttaggccagagccgtttgttatgccagaggattctcacatgagtttaagtccatagaggttataaactctgtacaatatttatgtgccccgtccctcttgttatttaatacaacaattgattgcctgggacagctaaagaatttaggtcatgttgaatagggttccttctaaatttacatggcacggtaataatttgctacttagacatcataccctttatgggttcctctgtaggccattttagagggaaaacaatccatatttgtaataaagctttatgcttgcttactgtcatcacatacttatttgagtttaaagataactggatttggtgtcaaaagatcttgatttgcaactttgcaaatctagcaatgtgtggaagattataagccacaattatgcactactggtgggtaatctttctggaatataatttgcgacattcatcagaacagaagtgttcattgacctagcaattgcacttccagatttatgttaaggacataattggacaagttcagaaatatatgtggagagacatgtgtaaagacattcatagcaatgtttatggtagaaaattgctaacaacttaaatgtccaccagtaagatcggctacataaataaaaatggtgcatctgcacactggaacaacatatagccgttaaaaacaatcctatgtttttagatatggaaaaggacctacagcatattaagtagttaaagccagttataaaaccatgtgtataacataatattgttcatgcaaaattgtatatatattttaaaatgtatatgatatattcatttaaatttttaatatgtttgtatagctttttatggttcagttttttttttttttttgagatgaggtcttgctatgttgcccaggctgttcttaaattcctggaatcaggcagtcctcccccttcagcctcttgagtagctggcactacaggcatgtgccactgcacctggctggttcagtttttaaaacttacttggaaataatttaaatggattagaggttgcaaaaatgtacagggtggttctttagctcccatagtttcttgtaactgtaacatcttgtataactacagtacagtatcaaaaataggaaactgacattggtacaatccccagagcttattgagatttcagctgtcagtgatacggtttggatattttgtcccctccaaatctcatgttgaaatgtgacctccaacgttggaggtagggcctggtgagaagtgtttgggtcatggtggcagatccctcatgaatggctagcgccatcccctgatgatgagtgaattcttgctcagtttgttcacacaagatctagttgtttaaaagagtgtggcatctctttcctttctctctcttgcttcttctcttgccttgtaacatgctggctcctccttcaccttctgcaatgattgtaagcttcctgaggccttaccagaagctgagcagttgctaacaccatgcttcttatacagcttgaagaaccatgaacaaattaaacctcttttctttataaattactcaggctccggtattcctttatagccatgcaaaatggactaacacagttatttatccgtgcattcatttatgtgtttatgtatagctctataccgttttatcatgtgagtagatttatgtaaccaaccatgatcaagatacagtgcttaccctttatagccacacccatcctctcctccccatccccatccctaattcctggcagccactaattagttttctatttctgtagttttatttcagcaatattatgtaaatggaattttacattacgtaacattttgagaagggctcttttctttcactcagcatagtgtcttgaaatccattgaagttgttatggatctcacttgttcattcctttttaattgctaagtagtgttctgtgttgtagatgtgccatagtttgtttagacagtcactcactgagggacatttggatcattaccactttttggctgtaatgaataaagttgctatgaaattcatgtacaagtttttgagtgaacataagttttcatttctttgagataaatgttcaagagtacaattgctgtgttgtatagttagtgcatatttagccttataggaaattgccaaatggctttccagagtggttttatcactttactttcccatcagcaatgtgtgagagagccagtttatctgcctcctcgctggcatttgatgttgtcactattttttatttttgcaattttgataggtgtttagtgttgcctcctggtgattttgggatggttcatttttacaataataaaaagtaatagccactttcttttttcttttcttttcttttttgagacagagtctcactctatcactcaggctagagtgcagtggcatgatctcggctctctgcaacctctgtctcccaggttcaagtaattcttgtgcctcaacctcctgagtagctgggattacaggtgtgagccaccagacctggctaatttttgtatttttagtagagacggggtttcaccactttggggccagactggtctcaaaatcctgcctcaggtgatctgcctgtctcagcctcccaaagtgttgggattacaggcgtgagccaccatgcacatccaaagtaatagccattttattttaaaaaataaaaataatggtcatcctagcctgagcaatcaggcaagagaaagaaataaaaggtactcaaataggaaaagaagaagtcaaaccatctctttttgctgacaatatgcttctagaaaatcctaaaaactcctccagaagattcctagagcagataaatgacttcagaaggatacaaaatcaatgtacaaaaatcagtagcatttctatacattgataatattcaagctgacaaccaaatcaagaatgcaaacccattaacaacagcctcacaaaaaagaaaatacctaggaatacatttgcccgaggaggtggaagatctctataaggagaacaataaaacactgctgaaagaaatcatagacaatacaaacaaatggaaaaacattccatattcatggatgggaagaattgacattgttaaaatggccatactgtccgaagcaatctacagatacaatactattcttatgaaactaccatgtcatttttcacagaattagaaaaaactgttcaaaaatatggaaccaaaaaaagagcttgaatagccaaaacaatcctaagcaaaaagaacaaagctggaggcatcacattatctgacctctaagtatactataaggctacagtaacaaaaccagcatgatattggcacaaaaacagaccaatggaacagaatagagaacccagaaataaagccatatacctacagctatctgatctttgtcaaagcggacaaaaatcataaggaaaagacttcctattcaataaatggttctggaatagctgaccatatgcagaataatgaaactggaccactacctttcaccatataaaaagtttaactgaagatggattaaagatttaaatgcaagaacacagagtgtaggaatcctacaagaaaacctaggaaacaccattctggacattggctgtgggaaagaatttgtgactaagttctgaaaaacaattgtaacaaaaacaaaaattgaccagtggaatctatttaaactaacgagcatctgcacagcaaaataaaaaatcaacagagtaaacagacaacctacagaatgggagaaaatatttgcaaactgcattcagcaaacatctaatatccagaatctataaggaattcaaacagttcaacaagcaaaaaccaaataaccccattaaaaaatgaggaaaaggcatgaatggacaattttcttttccttctttttctttctttttttttttttttttgagatggagtctcactctgtcacccaggctggagtgcaatggcgcaaccttggcgcactgcaacctctgcctcccaggttcaagcagttctcctgcttcagcctcccgagtagctgggattacaggtgcccaccaccatgcctggctaatttttgtatttttagtagaagtttcaccacattggtcaggctggtctcgaactcctgacctcgtgattcacctgccttggcctcccaaaatgctgggattacaggcgtgagccaccatgcccagccgtgaatggacagttttcaaagggagacatataagaagccaacaaacatgaaaaagtgctccacatcattaatcattagagaaacgcaaatcaaaactgcagtgatttgccatctcacaccagtcagaatggtgttattaaaaggtcaaaaaataacagatgctggtgaggctgcagagaaaagggagtgcttatacatcgttggtgggaatgtaaattagttcagccaccatggaaagcagtctggagatttctcaaagaacttaaaacaggattaccatttcacccagcaatacctattactgggtatatattcaaaagaaaatannnnnnnnnnnnnnnnnnnnnnnnnnnnnnctcacacctttaatcctagcactttgggaggcctaggcgggaggatcacttgaggtcaggagttcgagaccagcctggccaacatggtgaaaccccatttctactagaagtacaaaaattagccaggtgtggtggcatacacctgtaatcccagctactcaggaggctgaggcaggggaattgcttgaataccgggaggcggaggttgcagtgagccgagattgtgccattgcactccagcctgggtgacagaaagagactccatctcaaaacaaacaaacaaacaaaaaaaaaacagaaaaaacaacagtaaattggataaataaaatgtgctatatatatgccatagactattatgcagccataaaaggaatgaattcatatcctttgcaagcaacatggatgcagctagaggccgttatcctaaggaaattaacataggaacagaaaaccaaatactgcatgttcttacatacaggtggaaactaaacattgattacttatgtatataaaggagaacaatagacactgggtactactatggggggaagaaggagggggacaagggttaaaaaactgttgggtactttgctcattacctgagtgatggaatcattcatatcccaaatctcagcatcatgcaatatacccatgtaacaaacctgcacacgtacactctgaattcaaaataaaagttgaaatttaaaaaaaataaaaaacctagacttaaaaaagtctttgttctgccacttagtattttctttatcagtgtgaatatctcatctataatagaaatactacctgctattcctttttcacaagatggctgtatcaaatgaaatcatatattcaaaaccaccttgtaaactataaaacatcatacaaatgtaagttgcttaatactgagagatgtcctaggtgtgaacaaggatgttgattttctttgtcatctactaggtttatacttctattgtaatgaaacattaatgtaaataaaatcaaagcagatcacttacagttgtttaatagagctgctttggtactatttcaaaacgtataaccacttcaaaattactaaatgatgttttatactcccctcctgctcagtgcaggggaagataagggaaggctgataaattagtaatttaagtgtgtattaagggataaataaataaatatttgacagttcaatacttatgggttttcttgttggttttggggagttagggaactcatatttattgagctgtgtgctgggcactttccacacattgccatatcatcttcatagctgtcctatgagttggtggcatttttacctccattttacagatgagaactgcgattctcaaattaagtaatttggctaggtcataccagtagttaatgaagaagttggaacttaaatatgcagcttcaaaaatcgatcgctttccattataccaggggcatatctgcttttcagtaacaagcacaagattggaaatctatgtgagcagtgtgcaggagttttgctaattgatggcagtggttaaactgagaggtagagtgcacttggtgtatatgttttaaacatgatccgcctatgaatccagtgggtgcagagacgttccatattcttgctgttggaaatccttcctagtattttaatttggtctataattttagtggaattaaacaagaatttttaaagattatgtacctgattgtgttgtgatttagtaacagttagtggttcatcaaaatctgctagccagacacttggcagcagtggttaattatatagggattgttgtgagcacatggttagactttatcatatactctagtggagacctgattattgctgtcgttctcattatctttttcttcccccctaaaaatctcaggatggttgtagccagggtcagatatttaaccattatatgccctgaccatcttgctgctgctctaagagttttgttaatgtttgtgttttattttgtgcttaatgactccccattagatgtaggatggaatccaaactccttagcatgacataaggatactccattcttttgctctgatttaccttaccagtcttctctgcaacctacacttcatgtagagggtgtgaggttgaggttgatgacagttgtctccctagggagattctcttcatgaaatccaaggaagcaaacagaatatggcccagaagtggcaatggtaatgtttaagagcttcctctatagttgtgaacattttcttttttctttttttttttttttgagacagagtttcgctcttgttgcccaggctggagtgcagtggtgtcatctcggctcactgcaacctccaccttccgggttcaagtgattctcctgcctcagtctcccaagtagctgggattacaggtgcgcatcaccacactcagctaatttttgtatttttagtagagatggggttttgccacgttggccaggctggtcttgaactcctgatttcaggtgatccacccgcttcagcctcccagagtgctggtattacaggcatgagccacagcacccagcctagttgtgaaaattttcataaccacttccttactgaattatcttccgggtagcccaatgaagtttcttaaccgtgtttcagattttgtgtgtgtgtgcgtgtgtgtgagagagagagagagagaaaggttgattgattgattcttgggcatagttctccaatcccttagtaattgtttattgtgatgtcaccagcaaaactgacacaaagaaatgacagatgtttgagatgaggatgccccaattaccctgatttgatctttcacagtgtgtacatgtatcaaaataccacatgtatcccacaaatatttacaattattatgtatcagtaaaaaacaaaataaaactgagattccagttttgtgactcccatctgtttatgttgctgccaaagtgatagtgtggccatcctctgagaagaaggcttctaatatatggattgcttcagggagagtcacacctggtcattggatcagtatggttgttgagagtttagtttgtttagctactttgactaagagattactagttttaagtatttatccctaatttcccactattgacagttttcaaattgacctggaggtatggaatttatgtatgcattaaacttgaagtatactgtgtgatacttatttagtctgaattagtatgaatatttgacactgcctttttgcccccttttgtgtgtttttactgcccaaatctgccttcagaaacaacatttggtttctaattgtaatattcttggaaacactggcatatttttacagtaccattttacttttatttactgcaaatgatggtttgttagttgcctgctgccagcacatctgagctcatttgtttaactaaaacagcattgtgcatagatgcctgtaacaggcagcaacagttaccaaccaccccagttccttactacctcattatagctctaaatcaagcaaataggaaagcagattattcttaaaatgttccaagaagtttagaaaattgagggatggaaggatgaaaggaaaggaattctaatgtaacaaacaattggtgtgttgcttttggcaggggtgtgcctggctgatttcttctgtagaaataactaacacttcagagtgcagaaattgcaggcatcctgcaacaaacagagctctatgactcctttagttaataaataattaccaagtggtttttttctggctgagccactgtatcagacacagtgggggatgtataagtgaatgagatcttcctgttctcttggagcttataatgtgggctctgaagatgcttctgctctaaagtgttgattgttgaacgaggcagtggcagtggtgctgtttcagattgtggctgtgtgttgggggatccaggcctgggggacatagtcacagaatggcaggtgctggctggctcaccacagtggggagctttccagataattctgacaaatcagactgcttcaaaaggatatgctcttttatatttggaaagaaagaaatgtcttttagtctgggtgctatggctcacacctgtaatctcagcactttgggaggccaaggtgggtggatcacctgaggtcaggagttcaagaccagtctggccaacatggtgaaacgtcgtctctactaaaaattcaaaaattagccaggcgtggtggcaagtgcttgtaatcccagctacttgggaggctgaggcaggaggattgcttgagcctgggaggcagaggttgcagtgagccaagatcactcactgcactccagcctgggtgataaaggaagactccgtctcaaaaaaaaaaaaaaaaaaaaaaaaagaaaaataaaaataaatgtcttttaaaaaatattttaacagaaatttaaacttgagcggcagaccttgccttgagggctggagactgggaagtgtttcctaaggagccaggggaaataattctgtctcctggtaatgaaggtctgagtggtgtctgacagtgcctaactgcctgctctgtaccaggctggaatactgtgatgaacaaggagcccacaatctagtgggggccatagacaagcaactgggcaatcttactgctgcgtgctcagttttatgattgagagctgttgggtgttggggtggagaatggacttcttaccttgtcttaggtgagacctgatcaaagaaggcttcctggaaggagtgatgtccaaaccaacctcactaatatacgttggaattaatccccttttcaggctaatactgttgtaaaaataaaccagagccctgttttggtttttgtttatacccaaaacaaaaatggagagactgaacttggtattccagccgtctagaatacttttccagctttgtagtttgccattcccctgtgttgattaaccaccccttcccagggcatgccaggctctctgtgactgcgatgcctctgcatgcactattctctttgttctgcctgcctgatgtctcttggcccttcaggaagaatagttacttcctccaggatagcctctttgattccttctatggtacgttgagtgcacatcctgtgagctcacacacagggctggtttcataattcatacttcccctgtactgaactgtctgtctgctttttcattcctccatgtagcctggaggcagaggcagcatctttcacgaagcctagcatgtcctaggcacccaagcactatttgctgatgaacaaatttagcagcttcgaagattacagccatatgtgtataattgaaactcttggttccagtcagctttaaaagagagtgccattgactgaagaaagtgaaatagattttatgcatgtggtctagttattaatttcataaagctttttacaatcctttgcattttatacctcttttactttttgtctgagtaaccaataaaccgagtaattcatagttcccatttcttgccaactactaatgtgtatcattaaatctgaccacagtgatttattaattagaagtcttctggttgtcaacaaaaatcagttttacttactatatgccagaaaaaggggaagatgtgatgaagacactggagtgtctcatagaatccaagatcaggaacacactcaggcttctggaagaactggtcccaggaattggaaagccatcagcaatcctgagggtcctttctgtttatgtctttctttctgcaaagcttttactcatctttcttactaactggctttctctgccactctgtcggtagagggtggcctcccacagccctaaactatgcagccaagttctagccaaatggaaagcctgtctttccatctcaattctaaattctctaagacttgggctaggcttgggttagatgtctatccctggactagtcagctgtggccaggagcggagacatgctgcacatatctgtctgcctctgctcacctccgaaaagtaggtgggaagatagaaaaaggggtagggaggcagcagacagagagacagacagcagagagacattgtaaggctggcagacaccttataaatatctaatatggtgagtctccataaactactacccttaaactatatcataggatcacttctaggttattttgttaaaaaaagtcagtcctaggtgaaacttaaaaaatttaactttaaaaagacgatatcttttaaaatatgcatataatttgagactcttaaggtaacgggatattcactatagttagtaagtcttagctttgtgtgtatatatgatttttatgcatgacactctttaattgctgggaggttctagcagctctgtccagcagaaatacaagataagccacatttgtaatttaaggttttctagtagccacattgaaaaagtaaaatgaaaaaggtgaatttaattttaatgtattttatttaaccccagtttcccagatataatcgttatatgaatataaaattaatgaaatgttttacattcttttaaaaacctttgaaatatggtatgtattttatgctttagcaaatctcagtttggaccatttcaggtggtcagcaattacacatggctagaactaagagcaatcagttttcttccacagtttttctaaaattttcttgtcaaaaatcttgatggtatgaattactcttttaaaaagtgcacttcaccagcaacagaaaagaaccctggaggggtatgggttttaaagctggtacaaaagagttgcccatttggaggatttactgcaccatgtgtattggtaaaaaagaaaacataatttttaaccaagtcaccaggctctaaagccagttcttgttcttctcagacttctgattcctggaattttactttaaactccttggatgcctcagtttgcttatctgtaaaaataagatttataatggtcctgtcccacagaagagattttcatggaatttaattgcaccaatatatttgaaagtgttttgaaagatatttaaagggttaaacaaatgtgaagcattattttaatttatcatctatgggtaaattactacattttggaatcaataatagttatcatttttaaaaagttttattttgttaattgacacataattgtacatatttatggggtaccatatgatgtttcgatgcattatacatagtgtaatgattaaatcagggcaattagcatatccatcacctcaaacacttgttatttctttgtggtgagaacattcaaaattattttagccattttgaaatgtaaagtacattattgttaactctagtcaccttactgtatgatagaacattagaacttatcccttttatctaatgtaactttatacctgttgacctctctccctctccctgcctgtcctacccagccttcagtaccactattctactgtttatctctatgggatcaactttttaagttttcacagatgagtgagatcatgtgttattcgtcttttgtgcttgacttatttcacttaatgtcttgtgggttcatccaggtgccgcaaatgacgggatttcatttatttttatgcctgaatagtattccattgtgtatatgtacctcattaaaaaaattcatccattgatggatacttaggttgattccatatcttggccattgtgaatagtgctgcagtaaacatgagagtgcagatatctctttgacatactgattttgttttctttggatatagaggttgagtatccctaatccaaaaatctgaaatccagaatgctctaaaatccaaaactttttgagcactgacgtgatgcttagaggataatgctcactgtactattttggattttggatttttggattagggatgctcagctataatgcaaatatttcaaaatcggaaaaaaaaatctgaaatcagaaatgctcctggtctcaagcattttgggtaagggatgctcaatgtttatacccaacagtcggattattggattatatggtagttctatttttaatttgttgaaaaacctccctactgttgtccttaatggctgtactaatttactttcctaacgtcttggtctgttttgtgttgctataaagaaatacctgaagctgggtaatttataaagaaaagaggtttatttggctcacacttctgcaggctggtaccagcatctgcatctgatgagggcctcaggctgcttccactcatggcagaaggtgaaggggagctggtgtgtacagagaacatatgatgagaaagggtgcaatggggcggggaggtgccaggctctttttcacaaccagtactaatgggaactaatagagtgagaagttacccacttctgagggagggtatcagtctgttcataagggatctgcccccatgacccagacacctcccattaggccccacctctaacattggggatcagatttcaatatgaggtttgtagggatcaaacatccaaattatagcacctactaacattgtatgagagtttccctttctctgcatccttgccaacatttgtaattttttgtctttttaataatagccattctaactgggtgatgtgatatctcattgtggttttgatttgcttttccctggtgattagtggtgaggtatatttttcatatacctattgccatttgtatgtcttctttttttttttttagacagagttttgctcttgttgcctaggctggagtgtaatggcacaatcttggctcaccacaacctctgcctcccagtttcaagcgattctcctgcctcagcctcctgagtagctgtaattacaggcatgagccaccacacctggcttattttgtatttttagtagagatagggtttctccatgttggtcaggctggtcttgaactcccaacgtcaggtgatcctcctgcctcagcctcccaaagtgctgggattataggcatgagccactgcgcctggccttgtgtttcttcttttgagaggtgtctatttaggtattttgttcatttttaaattggatttttttttttgccattgagttccttatgtatcctggatgagtcccttgtcagatgcatagtttgtgaatattttctccttttctgtggattgtctcttcactttgttctttcctttgctgtgcagaagctttttagtttgatataatcctatttgtctatttttgcttttgttctctgtgcttttgaggtcttatccaacaagtccttgcccagaccaatgtgctgaagcattttacttaagtgtcttctagtagttttcatagtttcaggtagtacatttaagtctgtattttaagttgatttttgtaagtggttagagatagggttctagtttcatttttctgcatgtgaatattcagtttacacagtaccatttgttgaagagattgttctttccccaatgtgtgttcttgatgcctttgtcaaaaatcatgtgtggatttatttctgggttctttattctgttgaactatctggaaaagaaataaggtaatacatttacagtagctattaaaaaaacctagcaataaatttaactgaggaggtaaagatctctgcaatgaaaactataagatattgatgaaaaaaattgaagaagacataaataaatgcaaagaatatcccttgttacgtatcggaagaataaatattgttaaaatgtctatgctatctcaagtgatctacagattcaatgcaatccctatcaaaataccagtgatatttttcacagaaatagaaaaaaaattctaaaatttctatggcaacacagaagacccagaatagccaaagcaatcttgagcaaaaagagcaaatctggagatattacgttacctgatttcaaaatatactacaaagcaatagtaaccaaaacagcatggtactggtataaaaaaaaacagacaaatgaaacagaatctatcatttgttgaggacttactttgtgccaggcactgttctaagtgctttatcgatatcatataattaatttaatcataataaccttatgaaggtactgttactatttctgttttatatatgaggaaattcagacataaagatttaacaaaccagcccaagctcaactatctagtaagtagttgaactggagttgaaatgcacttaaaaaaattgtggtgaaatatacacaatgtaaaataatcattttaaccattttaaagtatatagttctgtggcattaagtatattcacattatcatgcaatcattaacaccatccatctctaaaactttttaatcttggcaaactgaaactctatactgactaaacactagttccctattctcccatccccagcccctggcaatcacctttttactttttctctttgagtttaactcctctaggagcctcatataagaggaatcatacaatatttatctttttgtggctggcttatttcacttagcataatgtcttcagggttcattcatgttgtagcatatattgaaattccctattttatttttatttatttatttttattattattttcttttgagatgaagtttctctcttgttgcttaggctggagtgcaatggtgccatctcagctcaccgcaatctctgcctcctgcattcaagtgattctcctgcctcagcctcccgagtagctgaaattacaggcatgcaccaccacacccggctaattttgtatttttagtagagatggggtttctccatgttggtcaggctggtcttgaactcccgacttcaggtgatctgcccgccttggcctcccaaagtgctgggattacaggcatgagccaccgcgcctggcaaaattccctatttcttaagactaaataatattccattgtgtgtatgtacatttcatttatccatctatctgttggtacacatgtgggttacttctacctcttggctactgttagtggagctgccatggacacgagtgtacaactatctcttcaagaccctgctttcacttcttttgggtatctacccggatggtaattttatgtttaattttttgaggaactgccatatttttgccatagtggctgcatcattttacataccatcagtgcacaagggtcctaatttctctgcatccttgctaacacttgttactttcttttttccttccttccttccttccttccttccttccttccttccttcattccctccctccctccgttatttcctcctcctcctcctcccctcctcccctcctcctcctcctcctcctcctccttcttcctcttcttcttcttctttttttttttttgagatggagtctgactctgtctcccaggttggagtgcagtggcacgatcttggctcactgtaacctctgcctcctgggttcaagcaattctcctgctgcatcctcccaagtagctgggatcacaggcgtgtaccaccatgcctggctaatttttgtatttttagtagagatgggtttcaccatattggccaggctggtcttgaactcctgacctcaagttatctgccctcctcagcctcccaaagtgctgggattacaggtgtgagcccacctcgcctggcctctttttttttttttttttttttttttttaaataaaagccatcccaatgggtgtggagtagtatctcgctctggttttagtgtttcactaatgactagtgatgttgagcatgttttcatgtacttattggccatttctatatcctctttggaaaatggctatttaagtcgttggtccattttaaaattgggttgtttggtttttgttgttgttgagttgtaggagttttaaaagtatattctggatatcaatctcttatcagatatgtgatttacaagtactgttttccattctgtgggttgacttttcactctgtagatagtatcctttgatccacagaagtttttaattttggtaaagtccagcatgtctgtttttttctgttgatacctgtgctttttggtgtcacatccaagaaattgttgtcaaatgcaatctcaagaaacatattttcttctaagctttatttctgtctctgtctatctgtgcctcttttctctgtgtcatcttgagtctgtctctgtatctgtttctgtatgtttgtatctttgtatcttttttctatatatttataaaccaccaaaacatatatgtatcgtctctcttttcttgctttatttcttccttttcctttttttctagaactttttgaaagtattgtagcaatcatgacactccatgtatttcctaaaaataatagcatatttctaaactataattagtactgcctttagaattgggcacacagggcccttgccttgagctctctactttggagtgcctttcttgaatttttctaagtctccctgctgccttaatgcctgaaaggcagggtgccccaagctcttctctttaggagtctcatatttagaaatacagtaaatttcctaattatattgaaaattgaagcctaacttttttttttgctgatcttattgttcactactgtgcaccatatttttcttctaaattatttttcttatctttatatatttctttaactgattagcatgtacatatttagtattatagtcattaattacctttattcttctgtctctccagtagtgagttgaaactcttggaggaagcaaccatttcagtctgcaggtcattaggtaagtgggaaaaatgtgtgtggggtgttgttttcaaattttgttttagattttgatagtataatatgaactgaattaatgaagtaattactcttctttgatagcaatagtaataattttttctatttgtggcattcacagatgctgctagaaggtacccttcagtcaatagcaatatgacacatgcttggctatatctgcagtagtggtaatggactctgctaagccatagacactctttcgtcttgttctttttgtgaattttgaaatactgaaaataatgtgatttaccaagtgctgttattgactatgttcaccagaacaatattaaaatctattaagaatgtatattaggaagtttccataacaacttgatattatggcaaagatcatggaatccagaatcattttatgattttaatttcagctgtgctacctattagctgagccttaatttcctcatatagattgaggataaggacaactatttacaggattcttataaggaaaaattaggtaatatgaaatattcagtacaatgtgtgtcatgtagtcattgcaaaccatttatgtcagcaaatgttacccttttcaggtcttgtttctcaaatgcttaactttcaagttcatagcaattggaaggaaattgtatatatttttaaaatgcaggcagttatacttagattgcattggtgctttgaaaagtaagacaatgtgtctgtgaaatacctagggtacaggaatgtaataagtgagaacaatattctgttttaaaatcaggctgtctaggccggacacagtggctcacgcctataatcccagcattttgagaggctgatgcgggtggatcacgaagtcaggagttcaagaccagcttggccaagatggtgaaaccccgtcactactaaaaatccaaaaattagcaaggcatggtggtgggcgcctgtaatcccagctacttgggaggctgaggcagagaattgcttgaacccgggaggcagaggttgcagtgagccgagatcgcgccactgcactccagcctgggcgacagagcgagactctgtctcaaaaaacattaaaaaaaaaaatcgagctgggggnnnnnnnnnnnnnnnnnnnntcctgggcttcagtgatccttccacctcagcctcctcagaagctggggctataggtgcatggcaccacacctgcctaatgattttattttatttttgtatagatgggggtctcctgtgttgccgaggctagtctcaggctcctggccgcaagccttcctcctcctaccttggacccccaaagtgttgggatattacaggtgttagccaccgtgcctgggcccaaatatttttgtttttaaaaacaaactatgttgataatgaaaaggtgttattgtagtagttgtcttgccttacaaccatagcttagggaattttttgctaaatagagctggctttcaaaagccatgtcgcaattcagtgctgaaaattaaggagttttatgtaacaatattagtgtagttactgtgataatggcttttaaggtgactttgggtttttaaaaaaattataaaattaaaagatgaaaaaacaaaaatataacaaagcaatgagaaaacaaagaaaaaattacattaagaaaactgaaagtagctgggagtggtggctcatgcctgtaatactggtaactttaggaggctgaggcaggagggttgcttgaggtcagagttcaagaccagcttgggcaacataataagaccccatctcttacaaaatctacatcttacccatctacacgcaaaaaaattgaaaaaacttaaccaggcatggtggcatgtgcctgtagtctcagctgcttgcgagattgaggtaggaggattgatcgagcccaggaatttgaggctgcagggaaccatgatggcgccactggactccagtctggacaatacagcaagactccaaatctaggggcgaaaaaaagcaagtaatatttactcattatacataatgtggaaagcatactaaaatgtaaatgaggtagtaattgctcataatttgaaaaccctgacataggcattgttgatatttttgtattttttcttctactacttattcaatggatataaatttatatatatatcatccaccacacacacacacacacagacacacacacacattttaatctgtgtttttcacttgacattgtatcaggaatgtgttacatgtttaaaaatacttttgggaacagcaaaacaagatatacatttattgccccaaattccagtaatgtgatggtatggctaaaataaaaatcatctcatattaaacagtacatgtgtaatcactgctaatcttttgtgacaatttcatataaatggtattatttatattttgtttacacgcagcaacatgtcaggaacctcttcacatcaataagtataagtgcatatcaactttaagggctatgtgagtgtacttagtttcctttttgaaaaaaaaatttttttaagtgctggtctactggcaacaattttccttctcttttttcttttttttttttttgtctgaaaatgttctattttttttcttggcttttgaagcatatgttttgctggatatagaattttagatagacgttaatttattttccgtactttaaaggtgtcatttcgttattttctagcttttcttgtttttgttgtgaagaaagcagtcaaccttattgttgcttctttgaaaataatggaatttttaacttcggctgcttttaagtttttctttttatcttttgattttcagtagccttagagtgatgtgctgaggagaggttttctttgtttttttgtcgcctgaggtttgtagagattcttaaatctgtgagttggtgtcttttatcagtattggaaaattcttagccattatgtgtttatatataaaatttttgttctattctgtctctcctctcctcctgggacgcttgttacacttctgttcaatgttttgtttccattgtgtcccatatacttgttaggccttttttcttttgtagtttacattctttttctctctgaccttcaatgagatattttctgttaattcatctttagtttctaatgttttccttttttttatttttatttttattttgagacagggtctcactctgtttcccagctagagtgcagtggcactatcaccgctcactgcaacctcagcttcctgggctcaagaggtcctaccacttcagcctcctgagtagctgggattacaggcatatgtcaccatgcctggataatttttaagttttctgtagaggtgggatcttgccatgttatgttgaacttctgggctcaagtgatcctcccaccttggcccccacaaagtgctgggattacaagtgtgagctactgtgcctggtactaatctttccttttgatatgtcccatttgctgttaaaactatctactgagatttttaaaacaagcttttaattttagaatagctgtagatttatggaactgtttcaaagctagtatagagcattcttgtatactcttcagctatttcccctattttattatcttattttagtatggtacatttatttcaactaaggaatcaacattggtacaggtataccccagagatattgtgggtcagttccagaccactgagataaagccagtattgcaataaagtgagttgcatgaattttttggtttccccatgcttataaatgttatgtttacattatactatggtctatcaaatgtgcaataacgtgttaaatgtatgtatcttaattttataactgtgttgcaaaaaaatgctaacacatcatctgagactttaatgagtcataatcttcttgctggtgacaacatgacatcaaagatcacggattcgaccaggcacagtggctcactcttgtaatcccagcactttgggaggctgaggtgggtgtatcacctgaggagttcaagaccagcctggccaacacagtgaaaccctatctctacaaaaatacaaaaattaactgggcatgatggcagttgcctgtaatctcagctactcgggaggctgaggtgggagaatcacttgaacccggaaggcagaggttgcggtgagccgagatcacaactttgcactccagcctgggcgacagagtgagactccgtcacaaaaaacaaacaaacgagatcactgattaaagatcactataacagatataacagtaaaatgcttgaaatattgcaagaattggctgggcatggtggcctgtaatcccagcactttgggaggccaaggcgggaggattcttgagtccaggagcaacatagcaagaccctgtctctacaaaaaactaaaagaaaattagccagacatggtgactcctgagtagctactcaggaggctgagatgggaagatctcttgagcctgggaggttgaggctgcagtgagctgtgatcacactacgacattcagcctaggtgacagagtgagactctgtttcaaaaaaaaaaaaaaaagtaaataaatacgaagaaattttgcaagaactaccaaaacgtgatgcagagacatgaagtgagcacgtattgttggaaaaatggtgctgatagacttgctcactgcaaggttgccacaaaccttcaatttgtaaaaaatgccatgtctttgaagcacaataaagcaaagcacagtaaaatgaggttatgttaattttattgactaaactacacccttcactcagactttcactaactttctcctaatctgccttcactgttccaggatcccacctagggtgccacatgacatctagtcatcatgtatttctctggtctgcaacagtttctcagatttcccacattttttatgccttttgatgattttggggagtattagtagggtattttccaaaacgttcctcaatttgagttgtctgatggctttctcatgcttagactggggttataggtttgtggaaggaagaccatggaggtgaagtgctgttctcaacacaccgtatcaaggggacatgctattaatatgacttatcactgatggtgttgatgttgatcacttggctgaggtactatttatcaagtttcttcagtgtaaagttgtttctttctctcctgatcccttcattttcaaaggatagtttttctagatatagaattcttggttaacattttttttctctttcagcactttgaacatattattctactgccttctggtctctatttttttcagataaatctgacgttaattgtattattgttcccctgaaaatcatgagaaattttttcctgctgcttgtaaggtgctctctttgccttttaaaagagttttttggccaggcatggtgactcacacctgtaattccagctctttgggaggccacggcaggaagattgcttgaggccgagagttagatgccagcctgggcaacatagcaagaccctgtctctacaaaataagaagaaaaataaaaattaacctggcatggtggcatgcatctcttagatgtgtagattaatgtttttcaacaattttgggaaattcattgcctttttttttctttttttaaggaatagggtctcacactcttatccagtcttgtcttgaactcctgaccccaagcatgcctcccacctcagcctcccaaagcactggccattatttttgttaggctttttgtgtttagctttattacttttttcctgaatgtacacataaggttttctggatcagatttctttttttttttgagacagagttttgctcttgttgcccaggctggagtgcaatggtgtgatctccactcactgcaacctccacctcctgggttcaagcaattctcctgtctcagcctcccaagtagctgggattacaggcatgcaccaccacacccagctaattttgtatttttagtagagttggagtttcaccatgtcagtgagactggtctcagaactcctgacctcaggtgatccacccgccttggccttcgaagtgctgggattacaggcttgagccactgtgcccagcccagatttcttattaaatacttcacagtaaataagacgtccattggtccttctttgtcctagttcttaacccactaggatgatgtggtgagagccaggtcagttgttttttatgatagtcagactccctgtaggtgagggatgaggaaaaacgtttgccagctttataaagggtaaaaaagcagctgtaccatcctctcctgaaagagtgtgctctttagccctttggcatataaatacaatcttttcaggagccgggtatcctcacttcttgttttggcattttaacctatggatatctccaagttctgtggcctcatttgtcctttttttttttcttttttctttttgttcatgagactttttcctttaacccttggtgataaatatttctcattatgctttttctctttatggtttttcctataatttgatgaggtgttttgattggtgtacgaagatctttttcagttcagaaggtttttttttttctttttttcattatggctctgattttgtgttttagtttcttctccctacctcttgatcacctgtaatgttcaggttggatctctgttctttactttctgttatctttttgtctctgttcttttctcatatttcttcctttgtatgattgatttcaatgttttctacactgccagttctcctcttttactattgtagtgtatgttttagctgttattgcatttttagtttatttcttaatcatttctagtcgtttgtagatcttttaatgtcaggctgctctcttcttttttttttttttttgagatggagtgttgctgtgtcccccaggctggagtgcagtggcgcaatcttgctcactgcaaccttcacttcctgggttcaagccattgtcccacctcagcctcccaaatagttgggattacaagcatgcgccaccatgcctggctgatttttgtatttttagtagagatggggtttcaccatattggccaggctggtcttgaacttctgacctcaagtgatcttcctgccttggcctcccaaagtgctgggattacaggtgtgactcactgcacccagccttttttttttttttttttttggagacatggtctcactctgtcgctcatgctggagtgcagtggtgtgatcatggctcactgcagcttcaacctcctgggctcaagcaatcctcctgcctggcctcctgggtagctgggaccataggcatgcgcaaccacacctggctaatttttgtattttgtgtagagatggggttttgtgatgttgcctaggctatcttgaacttctggccacaagcaattctctcaccttggcctctgaaagtgctgggattacaggcgtgtgctactgtgcctggcttgctctcttttcattcatgcatttcccccagtggatttctgttcttttttaaaaaataggtgattaattttcctgttgtctactgttgattgctgtgtattaaaattcttttggcaattttgatttagcttttcttctgaggtttcagcgtaactcatttcttatcctctggttgctgttgttgttattttctccttttcattaaactaacacatatttatggagcacctactatattacaggcattatcctataagcttgggctgtgactgcaaaaaacactgacccgggtctctgacctcatggagctgtctatttcattgaggaaccagagaataaataaatatatctggtttatacaatgttggctgttcagaaaaataaagcagagtaaggggatggggtgtaacccatgaagctgcattgtttgctcccagagaggctgtgtttatttcctctgttgcttatatagatcctatagatgcttgttgaatctgctgttattttagtttgagagcaagttgatatagtttcccaacctaatttatagagcccaagaaggttttatttgtccaagtttcttagtttaaatgggaccttcattatcctcacttcttggctttggggtatgagggaatttggaagttcccagattgaacatctgtatcagtgtctttctacctctccctccaccgtatgctgctgtgttgtccaggccgaatatgtatctctaaataaggattcttaaaaaaaaataccactatcttattaaaaaaacaacttttaatatcacaaaatattcagtgttcaaatttgtaattgtctcattttgtttgaattgggggccaaataagttcacacattatttttggttatgtctttacatttcttttcaaagcaagtttcccttttcatctgtctttttcttcttttccctctctcagtgtatttattgaagaaaatgggtggtggagtttcccacaacgtagattttgttcattgtatccttgcgtggggtcatcttgtcctctctcctctgtattttctctacattggttgttggattttagagctcatgagtctttcggtgagatcttagaaaagtttgtttcagggtctagaagcaaatttaatctctcatctcaaacagaaatcctgtctacaatacccttatctgaatgttacccaaactttgcttgaattcttgtagggatgggggcattcccttctttacacaagcatcactagttaacagactgctacaagttcaagctctagcatcaggtaagttagctctttattaagcattcttgttatcttaattttacagatgaggaaactgaggcaggggccagttaggtaagttgccaagtgttctacagctggtcagtggtggaactgagatttgaacttcgtcagagtctataatctagtcccattacacttttctgctttcctgtcggacctcctgtgttgttactctggctcccgaagctcattcagcttcaacatagcattttatttgcaccaattaactgtgatcatgtaaaatttcttttcttctaccattgagatattttggaatcttgaatctaccatggagtattgtttaaaatcattgagtgtatttaattttattaacttattgccctaatcttcatcttatccaaaagagtatcatggaaactttttaactgtcttggtaggtaagctccatgaagacagggagttctctttacaagtatctccttagtatctgaaacagtgtgggcacatatgagtagctcaataaatacacgctgattgagtgaatcagtgaagaaggtacacggcgctttaattacatcaatcaagtagtcgggttactctttccaaaaacacaagatgttttgttttgtttttttaaatagctaatcatttatacattcaacaattacaaggccattcagtaataaagggggctgttgaatgaacaaagatttcaaagttgggattctgagtggtgattgtagtcatgttaccctcagcttagtttgtttcagcattttgtttggatttacaatagctagataatattaagtcccacagagatgcgtttgcaaaccttaactattctttttttttttttcttaaaaagtttaccctgaggtctctgggtattctttcattaaccctaaagctttaaagaggaataggacatttttgtttcaaagtgaaactcttaacattatctactatctgatcacatatctattcttgattgtgaaggctggataaaaactccgctgattgacaacaaatgttgcaccttgctactcacagtgggattctccagccagcagcagcagtagtggatgtcactggggaacggtagagatgcagaatctcagtgcacatttcacacatgtgcagtccatttgcatttaaataagaatgacttgtgatttaaatgcacattaaactttgagaagtactgtcagcttcagttaggagtatggtggacctgggattctgaacttccaccaagctctcagataatgctgttgtggccggtccatgagccacgcttggaatagcaaagtgcttgacattttatcacagttagaaagttaggcagttacttgaatagactcttaagtcatgacaaaaatatatatgcagcagggagtgagcttggcagttagtaagcacaatgcaggtatgctgtaatgctgtacttattcccatgtataatattttaaaatatatatgtatgggcctgaattttaaaaaaatattctggaaaacttcatttttttcaaatcttgacacatttcagtaagttcaaatataccagcttgggcaacatagggcaaaaccatctctacaaaaaatacaattagctgggcatggtggtgcatgcctgtagcactaactacttgggaggctgaggcagaaggatcacttgaacccaggagctcaaggttgcagagagctatgattgcaccactgctgtccagcctgggtggtagaccgagaccctgtttctatgttaaaaaaaaaagaagttcaaatatatgcgaaattcccagatctgcataagaatgaactttcctggcagcctaagtcagtgtgtttgagtgtttgcatttccagttttcaaactagttaaaaatacttcagaagagaaacaattatccaggactctggaatctcacattttgaaaaccattggtcaaggaaaaagactgtgtttgctactaacatattgttgactttaagctcagcgcttagcctttctgagcctgtctcttcatcagtcaaatggaaggttctacaaaatagtctctcccttctgatgaattcttagcttctgtgacttgctgtgcagcccaatagagctttatagtttccttaagtccaatttcttgattatagaggttgcttcaacctagcagtttaaagtcaaagatttgagccagttgataaggatgtttccttgagcaagtaacaacctccaggtgaggatcggtgaaatgcaagtgatactagtgcttttcctggagggttggtgtgaggattaaatgagttaatgcatgtaaagcacctactctatgttgttcagcatatgttagctgttgtttcttttacagatgagaaaactgaggttggagaagtacagtgatttgtctgagattcagtattcagttaattatagacctggatctagaaactaaatcttctgattcctgatacagttgctgaaatgcccatcgtttaaagttaaaaaaaaattctttaaagttttgtctggtcaaatagctccccttctagccacactgctttgttgatatgttttcttaatttttcattcaaatgatttgtaatctgaagagtgttttagatttaataaacttttatagtttattatattctatatactggagacatagataatcaatttttgagtttttaaaaatctcctttctagagaaagatttagtgtgtaagttgaatgtgtctattaactattttttcctttatgattttggattctgagataagatggctacttgtactgtttctatcattttcattttgcaaatcagtttttgatgttcagaattaagaccaagagcagcagtttctctcattgcttagttctctaattaggtatgaaattaacagtaaagttggtcactgagcaattttaatatgacatttggttttataaatgttatgataagctcactttgattttagttcttaaatttaactttttaaaaccttttcttctcttgcagttgaaaacaatcctcgaacaggaaatcttggtgcactaattaaggtcttcctttctagaaccaaagaactaaaactttcagcagaatgtcagaagtaagctggctaattaaaccatgtttgctttatatttaacaatgtgaattttagttttcatttattgatggaaatggactgtggtcttttgaaaatctctgtgaaggaattattctcattattaagaaaaaaaggtagagaggttttaggttagtgtctaagtcactggggtgagattatagattcgggaatctgatttcagctttttagacaatctttagattatattctttaagaaggtgaataatgatgtaattatcgttaagaaggtaattcccctcccccccattatcactgctgctgctatctagtttaaatgatgacttagtctgagttttatttcattctacatctgttgcagttatttccgttatattctttacatcaatggaaggttaactttttatgcactgaagcatttttcaaaaccatgtttggatgtcagtctctgaaaagattaaaatattttgcattgtcttgcttataaacaaattacattgaatccaataaagtttttcttgggagttcatggtcattaatacaaataaaaagtattttaccgtgctgctggcaatgcctcgtcgaaaattttggttacatatttgcatatattctttttatgttaccacaattttttaaattttttggtagctttcttctcttttaatcgcatgtacgtggtatacctattaagaacaaagaacagtcattcctacagtcatcagtaaagatttttattaagtagattcactatgtaaagtacatggaatgaactatgaagtaaaacataatatcactggtacaatgaaataaatcatgagccattaaaagatatggacattatcctaatattaccaataggatggacaaaacggttgtcaaatcaggaagaaatcatgaactagaaataaactatggtgcttatgtttaaatattgattcttgtatgattttggtctttctagccacatcttcatttggcagacacacaatgctttgtttattatttgctgtttgctgaaagtgttcatctgtcagatgtcagaggaggaattacaacttcattttacttatgaagaaaaatctcctggcaattacagtaagtattgtttttaaagatgttctggatatatcatgtgtaacatttaaggataaaatttcaggaataaaagtatgattttgaaaattccagttatccttataattttcattttaaaatgaacttatactgtcattttttctttttctgtgttaatttaaatgagtgaagactcaagcgttttttgtttttgtttttcgttttaaataagaaagctggtggggttgaagctttcatttattttgactttcatgcatgtggatgaagaagaaagtaatataaaaaataaaactcacacaaatatgtatttctttcagaaaacagaggtgtcagttttaaatatcattgccaagtcaatatattattaagggagccaactagtcagattttatggtaaaggttactttcatagcgtgcagcaatagcttctgggtctgagtgtctttgggactacgacactttatcagaagtaacattttcaaggacagttttatgatgccaaagtgtctcatctttttctgaagatacagggaaagattacccttcacacaatctttcctttctgagggcaaggcagtgttgccccatagttttccgagttctgttttcaaaatagatctctgccctcatcaggctgacagcgtcacctgtgtgattcaaggtcatatgttaacatctcttgtgggaacaggtattgggagagaactttgagatgtgtatacttttaatggaggtctgtgtgctatgtggatttcatgcatatgtataataacactttcatatacctaggagtaatttttcactgtggtttcaactgtgttgctaaatacgtgtttttaaatgtcaaagtcaaatattgacaaagggaaacaaacgtataaaagagttactgttcatccaggtcaacatcacaatgtactgatttttcagtatatccatgtctatggggaatatttcttaaattctattatagaatttttatttatatttttatttttattctttttgagatggagtctcgctctgttgcccaggctggaatgcagtggtgcgatcttggctcactgcagcctctgcctcctgagttcaagcaattctcctgtctcagcctcctgagtagctgggactacaggtgcattccaccaagcccagctaatttttgtatttttagtagagatggggtttcagcatgttggccaggctgatcttgaactcctgacctcaagtgatccacccaccttggccttccaaagtgctgggattacaggcatgagccaccgtgcccggcctagaatttttaaaaacaatattatggggaagtagaaaagattctgtggaaagttaaccttttgtgcattcaagcatttcttaaaactatttttagatggcaaaaatcttatggaaattctggttatatcatttaaatgtattaaggtattatgttacattttgagcaaatgaaatgacatggtacaagaaaacaatagtttacaatactttcaactcaagtagcagagtgaccatgtgtatttatctcttctccctctgagaccccattacctgatggtagagcaattttctacacatactgttgagcaacttaggacagtcatttcatccttctttaggctccttatggcctctttcaagatcaggaaacggttttggagaaatagaatatgaatttctgttttactgcaatctttttcttcattcttatcctcagtgtatttccaaattagaaaaggacattcttcttgactcacactttgaaaatacgattttaccatcttctaacattttaacagcttttctgtgactggccaccttgatagccatttggcaggttcatgtccaaggagtctatcgcctttcatttctgtaaggtccgaatctcactaagttctgcaggttttgagaaaactgaaaggtggcaaacatcacagggcaggaaactactgcctcatagcaatgctgtgtgcaaggcatgcagaacatttagcaggcaagagctcttcattttctttggtcagaagtttgtagactaaatggaatttgctgcagtttacatatgccctgtccccaaataggcagatagatgagcagactctagtttgtgcttgagcaagatatcagcaatcttttgttttctgtttatgtggaaacatttttgttttcctctactgatactggacaaatatggttgagtgtatttaaattcaagtttcatccttgagagcatactgaattaaaaatatcacaattaagtttgtttcgtaagtgttctaaagtttctttccaacagatgacatagttggctggttgcagggaagggaaatcatatgttctacttttctttgaaagttattgtattagggttctctggagggacaggacaaatagcatagatgtatatatgaaggggagtttattaaggagtagtgactcacatgatcacaacgtgaagtgccacaataggccctgtgcaagctgaggagcaaggaagccagtttgagtcccaaaacctcaaaagtagggctgacagtgcagccttcagtctgtgtctgaaggcccaagagtccctggcaaaccactggtgtaagtccaagggtccaaaaacagaagaatctggagtccagtgtttgagggcaagaagcatccagcatgggagaaagatgaaggccaggagactcagcaagtctgttccttccatgttcttctgcctgctttattctatttgtcctggcagctgattagatggtgcccacccagattgagggtgggtatgcctctcccagtccactgactcaaacgttgatctcctttggcaacaccctcacagacacatccaggaacagtactttgcatccttcaatccgatcaagttgacactcgatattaaccatcacagtatctcaggtattattctacatttcatagttaaaatgtggataactttattattcttgaataaagcaagcatatcaattttagcagttttatttgctgtcatcttttattttcccttctgtcccagaagaccatttcatggaaggtcacttattgttttgtccagttttgagttagtatgaattactacctcattaactttgggggatagggggaaggggataggtactgaaattctctttgatgctgttaaaaaaatgttaaatttcagatactgtaccaagttataatttattaagaatagtttcctataaagggtgaataaaatgacaatgaatatgtgtgtgtgtatatatacatatatatatgtgtatatatgtttatatatatatatttttttcttctaaagcccaaggtaggtatagatatgtgtgtgtgtgtgtgtgtgtgtgtgtgtgtgtcttttcccctttcccgctttgtaactgtgagagccccaggtgtttaggggctgccccacgagtatttcccttggataaaaatgtttaccttgtcttctcaggggaaacaactctccagtttcactgtagatcagccattcctttcttggattctgtgctttctactctgaagtaattcctgttgaacttttgagattctgctctaaaaaagataggcagccaattttttttttttttgagacagtttcacttttgttgccctggttggagtgcaatggaacgatctcggctcactgcaacctccgcctcctgggttcaggtgattctcctacctcagcctcccaagtatctgggattagaggcatgtgccaccatgcccggttacttttgtatttttagtagagacaggggtttcaccatgttggtcaggctggtcttgaactcctgacctcatgtgatctgcccacctcggcctcccaaagtgctgggattacaggtgtgagccactgggcctggcctaggcagccaaattttattgaagctacctttcattaagctaccttggaaaagggagctgaggcacaggaagcaaactgaaccatcctaatatttttagagattgagcatttgtcatttcaccaaaatttatttcaataataaaagtccctttgactccacatttgattagtggtactggaaaaacaggtactgcttcctcttccccctaaactttcacaggcaaaatacattttctgtctctttctcagtcactaagtaggaaaggaacataagaccttctaagttgtttctgaatatagctagattttttgctggtcttgatcttcttttgggattgaccattatgttctctgactaccatataactgtatgttatagtatagacttaatcaaggattttgaggaagttaactaagttggtgtgtgagagatactgcagaattttggtattttgaatgttatatactttatttttttctaggagagaatatttgtgagaattatgtagaatctaattaatttaactattcccaaaccaccccatcatctttcacagttattgtttatcatttagcatgattttcagagcttgtgctttatacattgagtttgagtttcaagagatggatatgtttaatttactattttgatcattagccttctatattttttaaatatatactgatgtctgaagttagagcttttaattagaattgtgtcttgcgtgtgttagttttgttaatgctggccttcatgtttgtgatgccagtagtaccaaaaacatagttctgcttggtaagttgcaaaccttcccatgaagtgctagcagcaagaatggagtgaatgtttatcctcacagggcccaagagcatagcccactcaatacctgcaaacccagcactttgttttgtattatgtcctacaaaatgtgcatatttttactttatttaacgtgatattgtcagaggcatgggaaccagaacaactccatcttgaataggagctgggtaaattaagttgaaacctaccaggctatattcccagacagttaagacattctaagtcacagaatgagataggaagttggcacaaaataccagtcatgaagaccttgctgataaaacaagttgcagtgaaggagccagccaaaacccaccaaaaccaaaatggccacgagagtgacctctggtcatccttactgctacactcccaccagcgccatgacagtttacaaatgccatggcaatcttaagaagttaccctatatggtctaaaaaggggaggcatgaataatctaccccttgtttagcatatagtcaagaaataaccataaaaatgggcaactggcagccctggggactgctctgtctctggagtagccgttctttcattcctatactttcttaataaacttgctttcactttgcattgcggactagtcctgaattctttcttgcacgagatccaagaaccctgtcttggggtctggattgggacccctttcctgtaacatatttctctgtcctgtaacaatatcatttttattgtaatataaaattatttttcattatataccattaagtgaattgatgcattttagagatatactgtatttattttggggtccaaatctcagagtatccctgcaccccccacccttgtccaagcttgagaagcaaggttttttgttgtgcatcctaggtaacctaatgtaagggtagtgggagaatgacactttttcaaccataggccactttatcaagatggttatctcactgaaagagccatctctgtggtaatctctgtgattctgtctgcatactgacagaccttttctttctttttttttaatttgaacctatcattgtgaatatatgcttcctttatacagagttgacagttcaggattttatacatggttttttctttttcaggcagagtcttgccctgtcacctgggctggagtgcggtggtgcaatctcggctcactgcagcttccacctcccaggttcaagcaattctcctgtatcagcctcctgagtagctgggattacaggtgcctgccaccatgcctggctaatttttgtatttttttagtagagacggagttttgccatgttggccaggctggtcacgaactcctgacctcaggtgatctgcctgcctcggcctcccaaagtgctgggattacaggcatgtgccacctcacccggccctatacatgttctttagtgtttataattgagcctactcttggtccaccagcttaagtccaatgaatatcttttaagactaaaaactttctgtttttggcatatgtaattatttttaccttagtcttccatgttgttagtttgagatttctactttagccctttttatattttctgccaatttctttttacagttgataaaagagcaataaaattaaatgattacagagatactgttgaaagggggaaaaatggagcatcaccatgcagtagctgaagacatccatttatcagctgatatatgatatctgatttaggtatatgaaagagtggggtcgataatatacagtggtacaggttgtttgaaggtcgaatttacaaaagtagagggccatctgcaaacaattgagcaaagtcaactgaggcatcttaggtatgttggcttattccacatacagcatttttttctttattccaatccattgtaatactgctgtgatcacatggatattgctggcattttcagtgaagcagtctttatgagagtaatgtgactgtcagtaagctcttagtttgtaatctaaatttgtgaggattttgtatttgaacattttcccataggctatgtatgatgtggtagcagattgttagggagaatttgtattattatatgaggatagctcttccattagtccatgcgtttgagaatcagtcaaaggggacaaagccagccctaggcaaaactatgaagtaatacaaaattgtttccattttccttttgccttcaatgtgagtttttctttcctctggcttggtattataccccattcttgccaaggtaatactgatatttatttcacatttggcgtcttataaatccaatattttaaatccttaggggcctaaatctgctgtttgtttttggaaacgcttctcatggcttgtttccttgtgtatttgatgtcattgattgtattattattattattattttgagacagagtttctgtcactcaggctagagtgcagtggcacagtcacagctcactgaagcctcagcctcctgaatagctagggctacaggcacataccattaagcctggctaatttttaaagattatttttggtagagatggggtctcactatgttgcccaggctggtctcaaattcctggcctcaagcaatcctcctgccttggccttccaaagcactgggattataggcatgagccaccacacttagccttgtttgatcttatttgaggctccaaataagggagagatttgcatttgcttctaaagggatccagggcctgtaacacctgatgccatgttagcatcctgcagcaattcttgacttaatgtggagtctcaggttcaggccccattccttgccactgactgaggcttagtcagtgggcttcattctaactggcattcatcctcagggttacctatcttagcgtttgcttacttctcagtgttttactctggattcaagtccatttatttgctcgtaggttgttcttttggttatagggttggagtccttagaaatttgctttacattctgggaagcccatcaatgcactaaaaagtgttattttagccaaaaactagatgttttgtacaggagggcttattggagtaactactccaccatgctgcaatgatagtttctttttcttttattttggagacagagtcttgctctctttcccaggctggagtgcagtggcacgattttggctcactgcaacctccacctcctgggttcaagtggttctcctgccttagcctcccgagtagctgggaatcacaggcgcatgccaccatgtccagctgatttttatatttctagtagagatggggtttcaccatgttggccaggctggtcccaaaccctgacctcaagtgatctgccctccttggccttccaaagtgctgggattacaggtgtgagccactgaacccgcctatagtttctttacaattattttttgtttatttattttttaaatgagggaagaagcctttggagattgagaggctgaagataaaagcaacaaagtgggggtggtgggaaataaagctgaaaggaaggtccagggaagtaggaggtgctaggatgaagagcccagagagggagttagtcctgttttgttttgttttttttttttttctgagatggagtttcgctcttgtttccgaggctgaagtgcagtggtgcgaccttggctcactgcaacctccgcctcccaggttcatgcaattctcctgcctcagcctcccaagtagctaggattacaggcgtgggccaccatgcccagctgatttttgtatttttagtagagacgggggtttcaccgtgttggccaggctggtcttgaactcccgacctcaagtggtccgcccatctcggcctcccaaagtactgggattataggcgtgagccactgcgcccagcgttattcctgttttgaaagagattaccacctgtggcccagtgggcagctctgtgagcactgaggggagggaggcagcagatcagctgcccagacctggggcgagcaaggtgctaggcccaagacactgtatgacctgtgagtacagctttgtggagagtagaaaagggacagggactcgacaaagccaagcggaagcctggctttaatggcacttccatggcacaaaacagttcaatataaacttatttttaaaaaattattttgtgggacttattctcaagcatagtagattaaacatgcatgtttgctttctcctggaactccaataaaatatcagcaaagggacttctaaaaagtcatgaatttattagattgaagaagagaggggaacacaatgttaataacattttgaaagttggaaaatggagtaatgatgagcttcactgatctgtgaaagctgaaagctaaatggcttcaaggttggagaactccagaaaaaaagccagttcttactccagaaccctggaaagtcttaggaatcagaagtgccaggggtctctgaaggcattcaggcttggttggaagaagcagttctgtccaaggttctgtcccttcccatgtgttaggaggccaccccccttcccagtttaatactagagatctgttatccatagaggctgaacccagagagtctcctgaatgaactctcaggcaatggggaaggagggtggcctactgagacgagggctcagtggaaaggccacatatggaagggtaaggtatcttgactaggctgctagaatgctggcaccaggattttacccaccctattccctttcctgccagattagtggatactcttatagagaaaatgaaccaaaacggggaaaaggcttacatttcagcgtcccctagtgaagcagcccgaaaccctccagtgggaaccgccgtttggcaggctctgcctgtgcacaccgcgctttcagtcagcattggcctcacgctggcaggtcagtggagagccaaggattccaaacagtgaaggcagtggctgacttgtgagagatcaaaacgaaacaaaaaagtgatacaagataggaaatttgtggaagtatatttaaaatttgttaattaccccctgtctaacacaagcagtttcctttccattctccccagacttaaaacatttttgaaactctttctttggaatcaccttcaaaacctgtggcatgtttgttttgccaaactcggtggcggtgagtcctgtgaaaccagctttgtttttccagatggctcaggtgcttcggctgccacggcagcaggttctctgctctcttttctctgctggaactgggccctagagactggggcaggcggtaggtagctcaggaggtaaacccaaaattgtatagtatgtggttgggtggtttttgctttatttgtttaaataccaaatttaataatttaaccttattagttataggtaagcaatgcaaaaaacaaacccatatggaaaaatgtggcccagagaaaaaagaaagcatggacttattcctttaaaatattgacttgtaatatataagacttgtaatctgtatctgcagaaaaacaaaagtgcctctaggaattcctgaactgttctttggtcatataataggtgtgattgttttgtcatatttctgtctcttctctccctttctttcccttatgttatcagtggaacaaaatcaattaaacttttctataggcacattttataatcaaacctggtagagtatattatcttttagggtaattagaaacatttctgtttgaccaaaataatagcagtcaaccagaattattactgatctgattggaatggtacaggacacaagcttataaatactgtagtgcactgaaatgcagatcacttttctttttagaagagtccttttgcctttcctctttatgattaacctacaagagacatttttggttttgctaattagaagtttaaatctaatattttagaataacttcaatgttagtttcactattaaagtggcaaaaacatagactctaccgtgagtcttttattttctgaatataagtttttaataaatataatttaattatgtgtcttccattttaaagaagccaattttattctgaacttctaaggtactcttttaacctatttttggagtacagccctgttcgattaagtttttagtacttgtatttggcacagtgtaattttgggcagcattaaaaaactggcagttcaaccttctgaacgcaaagaaaacaaagacaaaaactctgtcttttaacatttcttttaatgactgtatgtattctgatttaaatccatatgtttcatttttctggttgctttgttttctaatgatcagtgagtgctttttaaaaataatttttttactgtcttcccttcccctcctactgtgttggaaggcatttgattaggacagtattgtactgttctctgcttctctccctaaggacaaaacaacagtgctgtctcactcagcacatggtgctgaatggatgctgaatagaatgaactaacagggactgcagcttaattttgggtatagattattagaaccttaagggaccctagatatcatctcgcttgtctacttcttcccctggtgaagttcttagggactagagcagtggggctttagagtgagaaaactccagggatagggctgggattttagtgaccttgttctgcacaatacggatgataatagcttatatttattcattgttttagattatttgtacattggattttgaaggagtcaagaacttctagtatgtgttgatgaatacatagtgtgtcatctttatgtataaactaatatgtagtacttcagatgtctccctcctaaccgggcccatagtacttggggttttgtgtttacagtgttcagtaaaacatgaattggttgaatattttcccccaactttgtgtagaaacatatctttaaaaataatttaaaggatattttccttttaatttttttccttgagagtatagatttgagttccaatctggtttctgccccttactctaattaaactaacctatctgagccttgatgtcttcatctgtaaaatgatgatcataatcattaactattcatcaagagttactgtcaggattaacgttaacatgacattgagtataaagtgctcatcacaatgcctgtcaaagggtagagtacttggtaaatgtttgctgttaatatgatcttatagaaactaagacttaaaatattaaaatatttgtctggacctattgtggtaatttaaaactctttaagggagaactcttgtttgtttgtttgttttaagagatagggtcttggtatgttgcccaagctggcctccaactcctgggctcaagagatcctcctgcctcagcctcctgagtagctggtgctatagcaggtgccactgcaccaagcattgagagagaactcttaggagagaaatgttctttcttagagaactctaagttataaaactttacaatacagtaaacacactgaatctttgcaaagacctttgctcaaagaacctcagtttattttgtcattgacctgcaaatttcaagaacttttaagattctttttactgtatgaaatgcttgaatgtgttactatactttttgtaggtgagtttatatttattttttggaactaaggaagatatttggccttataagaaagctaaggtgatataagtgctagttgggaaataatgcaatatgaatggcttgcttgatgtcaaacctagtaagcagtcaaatcttgtcaatcttcacttaaaatacaattatttacttctagattagctgagaaacaagaatttagaattctgaggaattttttttttagtgaacggaagtcttaagatatttcagctggaaattgcttattgtcttttgttagagctttggccttgaaatattacattttacttctatgaaatatgtttatcatcatcttcattattttattagattggtaacaaagctgtgtgtatactccttaattgacccaactgtaaatttggccgaggttgtgatttgagtggcacatggaattgaatagagaatccttgtcatcattttaagatgtaaaaattaggtgtttttatacccctggaagttaaaaaatcaaatcaggcaccatctgtggttcctgagtgcttggtctctcaccttccgtaattaaaaaactgtgctggctgcttggctgaacagggatgttattaaactggcatttggtctgaaatgtttcttagggaatcactgagtgattttaagtgttctttcttgggcctgggacattgcatcctgtagaatgagttaaggagtgaccatttagcaaacgtacattgagtatatattacataccaacaaatcaacttgttggagtaggttgttaacttgagttatgttggacagccttggcaatgagagggattttagttagatctggtaactaatcatgcagtcccagagacaagtgtgacttactcttttatttttttttcttcactaataatagagccaagcccgatgtttcttggagtgagatttaatttggttgttgaacttgagtcttgctgtgtatcctttttagcatcgattgctgtgttcagcatgatttaatattctttttaagatttgtacttacctctcacggggttactgtgccagttctttgtggcaaagcaggatgaaatttctttataatttctgaatgctaggtgatattgtagcctagaaaagaaattgctaaactttttttttttgagactccaagtgctttgatgctttgcaattaactgctggattttttctgagatgcttgggctcagttcagcaaattgtattgagtacatactatgtgcaagctctttgtgagtcatcatcctctagaagtatagagtccagtaggggcctgcctgcttgtagacaaaaaatgatggcataatgtaaccaacatatgcaacgcaagaggcatgcacaaggcatagatactttatagattattcagggtgagacaagggagtgggtttcatggaggatatgaaactgaggatggttcagatggatacagatgggctttttaaaaactaggtttttattgttggaggctattccaggcagagggaatgttactgaggtgtgaaatggcatgtagtggatagcttggcattgctggaatatacactgcagtactggaggaagataaatgtagaaagggatgcaggacctatatctccaagagtctggcatgctgtactttggagcatggaatttttctgatatatattaatcagcttaaagtaattgaaaagatctaagccaggagagtgaaaggatggagtttagttagctctgtctgattgcaatctggagtttggattgcagaggagtaaaattggaactacaatactaactagttatgaaggttaaaggagtccaggagtcagttttctttctttctttcttttttttttttgagacacagtcttgttttgtcacccaggctggagtgctgtggcgcgacctcagttcactgcaacctcttcctcccgggttcaagcaattctcctgtctctgcctcctgagtagctgggaccacaggcgtgcgccaccatgctggactaatttttgtatttttattagaggtggggtttcaccatgttggccaggctggtctcgaactcctgacctcaggtgatctgcctgccttggcctcacaaaatgctgggattataggtgtgagccaccacacccagcccaggagtgagttttaatttagtaaacttgtttagctgcactgtggtgatgagataatgaacaaaaaagcatgacaatggtggaactctggggaacatgccaatagttgaaacgtattttgaggaagcagacactgggaagaaatagaaaaagaagttggttaaaaataaagtattataagaactgagaaaagaaagaatttcatgaaggagtaggtgtcagtaatgtccaagaccagaagtcacatgagatactgactgactttgggaatttggaggtcacttacctgtagtagtttgggataggggaacatttccattggaatggtaatttgcatcctgccgttgccacttatttattctgtgacttgggaaagcccttttacctttgactcattgtctgtaaagaggaggttggcctctttaatggggttcagtctatgatccgtggagtgccagaggttcataaaaggtaccttcaggccctcccatcaagaaatcaagggtaaggccagatatttgttggggagggagggataaaagtcctctacccctgcttcaaacaaagcagtgagagcagcttgatttttatctgtctcatatatttggctttaatgtaagatttcattgaaagaaacacagtgcagtataagaaatctgacaactactggcgtacaggagcctaaagtaccttcaagctttaaaagctgtattattaacagcaggtgttgaaaggtcctatgctagatgaagatcatcatagatgctaacctattcatgatttggattttattcagaggtcaacattaatatctgagtttatataatgataactgtttgtattctcattaggaatgaaaatgtaacttctgaacaactgtattctactgtgtactttgttaaaaaaaaatctttttatgtgtcttaccaggttctgactcagaagatcttttggaagaattgctgtgctgtttgatgcagttgatcactgatattccactcttgtaagttctggctaggccaggatttgttttatcttctttgtatatggcagataatcattgatcatgttgagaagtttgtgggtccttgtatagaacttatatgtgtgccttttaaggattctatatccacagagttcttttctctctacctaatatttagactgactattcattgtcaaaacaaaaatgttacgttgttaaggggaaaacagtgaaactatattaagaatatggtaggcacagaattaatctctgtattaagagatcttatagatctttggaaacaagattttaagagagaagcagtttgaatctacttcatattgtggtagacacagtgagttgagttctccttatcttcctgacttcctgattgtatttccagcctcttttgaagccaggttttcgtttccagccttctttgaagctaggcatagtcagtgagatgtaggggaaggtcctccaatgaaacctctgggtaaagctctctaaaaggaactgattgagtcagctaggaggcacatctttttgatcttaacagccctttctcctgctgtctggaatgtggatagtcttttgagttgcatagccttcttggcaccatgaaccaagagacttacagaaaattctgttttgatgtcattgagctgctgaaccaaagccaacaactaccagtaccaccttttttcatcctggacttctcatgtgacagaaatagacccttatttgttaacactgctgtaactgggcttctgtcactgcagctcaatgcaattcctttgtgattcgaaatgttcatctcatttgttgcttttaaaaatttaaagtagagacagggcctcactatgttggccaggttggtctcgaactcccagcttcaagtgatcctcccacctcagcctcctaaagtgcctggattacaggtgtgagccaccgtgcctggcctcatttgttacttttaaagcagtgattctccacctttaaaaaaaagtattggccaggtgcagtgtctcacgcctgtaatcccagcactttgggagcctgaggcaggtgtattgtttggatgcaggagttggagaccagcctgggcaatatagtgagaccctgtctctacttaaaaaaaaaaaaaaaaaaattaggccggatgcagtggcttatgcctgtaatctcagcattttggaaggccaaggtgggcagttcatgaggtcaggagttcacgaccagcctggccaacatggtgaaaccccgtttctactaaaaatacaaaaactagctgggcgtggtggcgcatgcctgtaatcccagctactcaggaggctgatgcaggagaatcgtttggaccaaggtcgggaggcagaggttgcagtgagccgagatcacgccactgcactccagcctgggctacagagcgagactacgtcacaaaaaaaataaaaaattaaaaaattaaaaaaatatattgtccccctgagaagccttgtttgacatttctttgataattgcctctcccacttaatgaaatttgaatccccagacacactgaatatctgtttatgtcctgcagccctttggaggaccgcaaaccattattattgtatctatgaagatttttacttacctctgtggaaccaatttacatctcctgttgaaaatgcatatgtacaaggaattatttttgaaataaaaaagtagattttaatgtttctcatcacagaatctcagtctacatggagatataattggaaatgtgctatttgtctatggccccaaaaggaaagacaggtatttgtgagaaaataggctccaggctgctgtcgtacatgaatgcagcatctagaattttaatatagatttcgaagtgagaaccaccaacccctgtcgtgatatggcctggtggtatgcacccaggaaagtagggctgaggcagctgaagagtcattgcctagggaaggaaatgggacaatttcccattcaaccggagctcctgcagcagacacttgcatgacatcctttctccccttccattctaacagaactccagtattgtttagagtggtgctgtgtgcccagattagtttttcagacactttggcggttccatgtgaccatgtgacatagtttgggtcaagtatatgtgagcagaagtcatgaacttgcagagcatatccactctagccttttgctcattgccttctcttccttcctggaatgtggaggcaatgcttgggctgtcttgaaactatgttaatgagcattgcatgcaaagactagtgtcctgggagcatgggacattggtgacaatatgaaactattacattggccctggatcccatatctttgggtttcctcttacatgagaaaaatagatacctatcttgcttaggccactgtggttaggtttcttttacatgtggtcagatcagggaagggaaacacatatactgtgtactgtttctttgtcatggtatgtggagtgcttcatgtgttcctgatgtaattttaaaagtagcaccacctgcaattttttttctttttttttttgagatggatcttactctgtcacccaggctagagtgcagtggcgtgatctcagctcactgcaacctccgcctcctgggttgaagcgattctcctgcctcagcctcctgagtagctgggattacagacgagcgccaccacacccggctaatttttgtatttttagtagagatagggtttcaccatgttggttaggctggtcttgaactcctgacctgtgatctgcccgcctcggcctcccaaagttctgggattacaggcatgagccaccacgctcagccctaaatatattttttttttatataacacaataccaggaatttagtatatatcttaaatgagtacacgctttttttttttttttgcctttattgataaaatgttttggtgacattcagggtgatggaaacagtaaatacctttagatagtaaattggctccaaacacaatgaatagagcagccatttaaacactcttgaggagcaagccgattgtgttgtaatatatcaaacatttcagtgttttaatgtgtttataccttttaaattagctgaaaatgcacagctagccagttgtctcctattatgtacactcagctttaaccagctgctgaaacaatttctgatgatttaatgttcttggaactccatcctacaagaaggtttgtcttggtaacagtttccatgtgaaaccaaactactctttaaatgtttcatttcctctaactgtagtgcagtatttatggatcagtgtataatttaagaggaaataggaatatatgcaaaccacgaatgctctcacacctgaacatcatcagaagtgctataaacgtttcacatttcacattggtaattcatcctgtgctgcattagcaggtaaataacaagatgaaatgaattttaatggccactgagggtaattcaaactagcgtaaatgtttcttatgagacttttaaaatcattctgttaatattgagagcaaagggtttaccacggacacatacatgtgtatgctatatatttatttagagatctgtaaactaaaatgtaaatgataccttattataaagagaataggatcagtggcatacttgaaataaactcccagaagttcattacagtgatctttgtaggagttcatttgtaatgaagattcacttttaagtagttagtggctactgtttctcagacactttggatttcttgataaaatattaattcacggaggtactaatcttcattaaaattgttcatctttcaggagtccttccttaactccatagctctcagcatttatatatttaaaataaagattaagtcatgcacgggcttgacatttttcagtgtgtattggatcgatcccactagaatttaaataaatcggccaaaagcaaatccttgcctttgatttttataccttccctgtgtctcagtgaagtaaacaggaaagtaataaagataaaggtattttcctcaagacactaatatggagtgttctaacagaaagaacgtgggtaggtaagccagaggtaaaagcccagcgctcggaacttgtgacactgtctgggttcttgtagtgttactataagggctgaatgagacttgtgggaaccaaccgagtggtggagtcaggtgtggccatagccgcagaagcagtgatgccgtatagacccatccttgtattttggggctgcttgtgatgctgttttgttaagaaatggaagttattttgaggactcaaattagatttttttcccttgtctttgtttttgttgctgtcatttttcagcaaatctgtggctgttagttgtacatgaggatgtcagtgtcaagcacaggccccactccttctcactagtgccaccactctgggcaggtctgctcagagtaggcctctttctattggcctcagacccaaaatacagcctctttctctgggatccatttctgtggtctttcttatgaacctgtgaactcattgaggactgtttaatttttagtctggccctgatttgcagatttgtcaattataatttaatctaagaaaactttttgtagtttttttcgtaaggtatagattgataaagatgagagtttcataattaattgctttcactgcctttttcagggagtgtgtatctatttgtgtactgtgacttgtcgagtacaggggatatctgatgtcatctgctaaccctcactggtggtcttgctaatgtggagcatgccagtccatgctgtgtctagggcctttgccttctttccttctacagtttgtcttcctttagatatttgcatggctcacgttctgaccaccttcaagctttcatctgcttcacgttttgtttctttagaaatggccaccctgactaccctatagagtagctttgaccacctgaaaatagctgccctctcattctgtgtcttttttcatgtgttatttatttacttatttatttatttttttgagatgggattcccactctgtcacccagcctggagggcagtggcacaatcatggctcagtatagcctcaactgcccaggctcaagcaattctcccatctcagactcttgagtatctggggccacaggtgtgtgccaccatgcctggctaatttttaaaattatttttagagatgaggtcttgctgtgttgcccaggctggccttgaattctgggctcaagcaaccctcctgccttggcctcctaaagtgctgggattacaggcaagagccaccacacctggcctgttttttgtcttaacacttttcactactcttcatattacctgttacctctcttgctcatattttcccaataaaactagaatgaaacctccatgaaaacaagggctcttgtggcagcatttggtttgctcactgctgctgcatccatgatattcaggttagcttggcacatggtagactcaaatatttctttactgagtaaattagtaagggtctaacctgttcactgtgcttaaagcattttgtttgtttctcagcatctagtctatatggaaacagtattgtgctaaggcatattccactgcaagtgtaatggctcatttgtagttggcacattgtaacaacagggtgtcttactgacattggtagtagaaaggggctactggaagctgaaacactgagaaataacacctgagaatgtttaagggactagtagattaattagttataaatgctgagtattctggggccgtttagtttagggacgatgggctttatatctcagtagtccctagattattcttagtataataatttctttttaattcaggtcatcctcaaaaacatattgtgaatatactatgtgtgtacagtggagtagaccctgaacataaaaaggtgtgactcttgaagagcttagaggtagatagacaaaaagataccccgatgagaagaacattggtagatgccacagtcatttggagttgaacagattagcactggctaaatcattaaagaggcagaaaagaactggatagggacttcttaggtatgaataatgtatttggaaaatcacaagcacattaggttgagcagagggtttgtggaatattagggataaagaagcaatgttgatgtagcaaagactcaaatgttagaggactaaagatttgattatttttagggttctctgtttattgagatataaaaaagaatataattattagaaatatttttctaaaatccattttggaaatatttgagtgtgaaactgagaatcttatttataaaattcagcttatagcattttaaaaatgtaataacattatataagatgcacatttattggatccatagactaatagtactgggttagatgttctactgtggaaatttgagtactgaaaacatttggtagtaacagtgagtagatggttcaagaacctaaagagtcataaatggtttctttatggagtctccaagtcgttggaagagagtgaaggtacaggagagacccatggttggcaacgaagggcctagctattgggaaaatgcctttctacagccctgcatgttgatgctaaaatacttctttgaatctagccgtaaggtgggtggaggagtgagggtagggttggggggtgactacagcaagtcagtattttaagttttaggtgttgcaaggcaaacatccagtatagctttctgaatgaattaggcatttaaggcatcgattgaatcaaagaatcaaagattgtagtattttcagataccaagacagtattacgtattaagtttacagtagctttttagcttgaaaattgatgtctggtgccttcagagaatttttcctggtaaaaaaccaagattgttactgaatgctgctgttaattttgtttactttattaatacatgtatagcaaaataggaataaagtgatttgacattaataactgcaaattttaattctcccaacaaacaattgatttttttctttttaattttttctgacttataacttacttctttacagagtaatttcttttcagacataatccagattatattacatttgaatattttctggtagtcattgatgctgaattttaagtggtcatatatgtatgcacatggtttggagacaaaatcacattgcacagaggcttataatgagaacaaatgttatttgtctcatccctttttaaatgtttcctcctgagagacaaactttctaaattctcacctgttctagtggtttatataaacctttaccttcatttaaccttttatatttctaaataatataccattattttgaaaaaataagtctttatatttatttttttacatttagttttgagagtaattttaggttcaccacaaaattgagcagaaagtacagaattaaaaagaaaaaaaattagttgtttgttgggagaattaaaatttgcagttattaatgtcaagccacccccacacacatatagccttctgcaccgtcagtgtccctcagcagaggaatacatttgttataattaataaacctgcattggcactggattatcacccaaatatagtttacttcagtgttccctgtaggtgtaggtgtttatcttctatgggattagacaaatgcatgatgaaatgtatctatcagtgtatcatattgatcaatatatctattgtatctgtcaatgtgttgatcagtgtatcaattgtatctgtcaattgtatctatcagtgtatcaatgtatcatctatctatgtatcatctatctatcaatgtacctatcaattattgatagatacatctgtctatacattgatgtctatctatgatatctatgatagatatcaatgcatatctattgatatctatatctattgatatctatacattgatagatacatctatcaatgtatctataagtttattgatcagtgtatcaattgtatctatcaatgtatcaatgtgttgatcaatgtatctatcattgtcatgtacagagtagatcaaaggatgatggttaaagtatgtttaattttgtaagaaatttatattctatgggattagacaaatgcatgatgaaatgtatctatcattgtcatatcatacagagtagatcaaaggatgatggttaaaatatgtttaattttgtaagaaatttatattctatgggattagacaaatgcatgatgaaatgtatctatcattgtcatatcatacagagtagatgaatgaatgatggttaaagtatgtttaattttgtaagaaactgcttaactgtcttccaaaatgcctgtaccagttttgccattcccaccagtaatgaatgagagttcctattgctccacatccttgtcagcgtttggtggtgttagtgttttaaattttggcatttgaatagatgtgtagtggtatctcattgttttaatttgcagttccctaatgacatatgatgttgagcatctcttcatatgcttgtgccatctgtgtatcttttttgatgatatatctgttagtctttggtccactttttaattgggttgtgttcttgctgagttttgagagttctttgtatattttagataacaatccattatcagatatgtcttctgcaagtgttttctcccagcctgtggcatttcttctcattctcttcacagtgtctttcacagaatagaaatttttaattttaatgaggcccttgctctcagttatttttttgatggatcatgtctttcacagagtaggaaactttaaattttaaaattttaatcttcctatcaataatttctttcatggattgtgcctttggtgttgtatccaaaaagtcatcaccatacccaaggtcatttggattttctcctattttatcgttttagagttttatagttttgcatttcatatttagatctgtcttttttttgcatgtggatatccagttgtttcagcatctggttgaagagactacctttccccattatactgtctttgcttttttgtcaaagaccaattaactatatgtgggtctgtttctgagtgctcagttctgttctgttgatctatttattcttttgccagtgtcatgctgtcttgattactgtagccttgtagtaggtcttgaaggataattccagtccttttagtttgttctgctgtttcaattttgtgttgatatttataggccttttgcttttctgtataactttagaaccagtttgttgtgttactacaagttactaccaagtaacttgcaggtgttgtgatttgaattgtgttgcatctgtagatcacattaagaggaatcttgacaatattgagtctttctatccatgaatatagaatatctttctatttatttagttatttgatttctttcatcaaagttttatggttttgctcatacagcttttatacatattttgttagatttatatccaagtgttttattttcttggttcttaatgtaaatgtataccacttttttgattcattaaattatttattgacgtctgctcagatgattatctccttctacttgcaccttttcccttgctatattctattatatttaaattatcatttttagtttttctgtgtaatatatgtctttattccttcaaatataggcagtaacacttgactttccctttgtaaattaaagatactacttcccacacccttcattcagttctctttcttttctcttcttacttgtattatctgtactttaatatctacttattttaccccaggatgacaagtttacttaagtatattctttgtaggaagtacacaaaaggaagccaaagagcagggattagttgggttcaataaaaataatgagaagacagaactctccgtctcttaaagttttacgatgtattttaattgttttaaaatattactaatttctagatcagaagacatctaggtaaatcttgtaacatgattggagctaagttaggggatagataatctaaatgggagaagtgacttggaaatgtgtatattttctttgagtatatttattgttttgagaatttactttaaatcggctaatgaaactactctatgaagacctgactagggaggaatttggaaacttttttgtttctacattttggacctattttactccctcccaaaaatctgtcaggatgacagagtatcagaatttacagagaaagcaatatgtgtacttgtaatttgcagtagatatattgtatttcaataaagagtattgaaaagctttaaaaaaaaatcagaccctcccagtaatgtacttaggcacagggagagtttaataaagtaaatcactagatactgtcagttatttgggcatcaaactttgctaaataatccatagttgattccttaagagtcagcttcaactacaaaaatccactccagtatcacgggaggttttattttattttaaaagttaggtttattgatgtataatttacatttagcaaaattcatcttttctattgttcagttctatgagttttgacaaatgcatacagttacacacactgaaattataatgtagaacaattcaattacatccctctcaagttccctagtttcccttgtagtcagtctgtatcccaactcctcgtccctggcaaccacttggcaagaagtacagcgtgatctactttcccatgtaagtttttgtttttcttggaatttaatggcatttcttagctttttgtgttttttcctttattttagcttcacttttaaaaataaagctttattgagatagcattcatatgctacaaaattcagctttctaacttctacaattaattgattttagtatattcacaaaattgtacaaccatcaccattatctaataccggaacattttcagcaccccaggcagaagccatgtgcccattagcagtcactcttcatttctcagcccctagcaaaaccgacctactttgtgtttctatgggatttggctattctggacatttcatacaaattgtatcgtatcacatatggtcttttgtgtttgcattgttttacttagtatgttttcaaggttcattctagttatagcatggatcagtacttcattctttttttattattttagcctcatttttgaaagttctacgtgtagtcttgggactaccctcattgacaccatcagtcctctagcttcaatctagactggttgctttctagggctatcacatagctgtgtcatctgggattcctcttcactattttcttgggtggcctccatagttgcctgatattctttaaagccatttttggtttatttcctcagttttcatgtagcacattctcatgtagcttttgaagaaagtattagtccttacttgtctatatttgtatgtatttgtcttgtatgtctacctttgaatgataggtaggctagttatgagtttctgataatcagtattccctagagttttgaagatattccattattgtctaataatattattagtgttgttagagggaattctgatgccatctgattatcattgctctgtatggtttttttttttcttttcctcggtggaagattttagaatcttgggtttgtctttagaattctgaaatatggtgatgtgttagtgtggctgatattttttcattgatggaactgcttattagtcagtaaatatttgttcttcaactatgggcagttttttgtgttattcaatatttctttgtgcatttcttccctctttttaaatgtaatttttatttgtttatttatttagagacagagtctcgctctgttgcccagactggagtgcagtggcacaatcttgactcattgcaacctccacctcccgggttcaagcgatttccggctaatttttatatttttagtagagccagggtttcaccatgttggccaggctggtcttgagctcctgacctcaagtgttctgccctcttcagcctcccaaagtgctaggattacaggcgagagccaccgtacccggcccttccctctttttttaagtctctctaaaactcatgttcaagtcagatactggactttgtagatttaacctctcttatctcaactttttaagtctctctaaaactcatgttcaagtcagatactggactttgtagatttaacctctcttatctcaactttttacatcttttaaaaaaattctaacttgttggaaatttgtttgatttttagtttttgacctccctcatcaaaatttctgtactaaaatacttatttttaataggtaatatgtgtgcatggaaaaaatcagacggtatgaaagggaatataataagtcatcttctcactttggacccttactgtctaatcttctattccctctcccattcatagcataccgcataaaaagtgtttcttgtttttttttttttttctttttttttctttttttcttgagacggagtctcaccctgtcacccagggtggagtgcaatggtgagatcttggctcactgcaacctccgcctcccaggtttaaatgattctcctgcctcagcctcccaggtagctggaattacaggcgcccgccaccatgctcagtttagttttgtatttttagtagagatggggtttcaccaagttggccaggctggtctcaaactcctgacctcgtgatccgcccaccttggcctcccaaagtgctgggattacagacgtaagccactgcgctcagccaaaagtgtttttaaataaaaatgataccagccagacagactattctgtaagttgcttttatcacttttaacttgatttttcccaatcagtagctatagatcaactttgattttttatagctatgtatggattgtctgaatatatcataatttaatcagtatcttatgaaaatttagttcatttccagtcttttactattataaacaacactccaatgaatattcatgtacataaattcacttcatatatacagatatagccatcatatgtattttagagttggcattaattgtgcacattttaagttttgataaagatgtgataaatttggtaacaatttattccctaaaaagattataccaattatagtcccaccaaaagcctctagtagagccttgcaaacattgtacattataaaattttttgtaagttaaagattgaagtcatactgtgatccttttttaaatttttttgagacagggtctctgtcacccaggttggagtacagtggtgcgatcacggctcactgcaagctcgaattcctgggctcaagcaagccttcctcctccacttccctagtagctgggactacaggtgtgtgccaccatgcccagctaatttttaaaatttttagtagagatgaggtcttgctatgttacccaggctggtctcaaacttctggcctcaagcaatctttctgcctttgcctcccaaagttttgggatgacagattgagtcacggcgcctagttatattgtgattcttatgtgcatttgctcattgtaagtgaagttgaatatctcttaatatttttaaaagccatttctaacatttgatgaaattttacaattatttttagttccggagagttctttttctctgattattccatgttttatgagtgcaacattttgagttgacctaattgcactttggacatgtacttacccaccataaattctatacttgttacaattttggaatatttgctttatcattatatgtccatcttttcaatctgtcagtctatcttaatttttgtttttaagaatatttttaataactttttttgtgttgaactttaatttatttcaagaaaatttatggctatattttaaatatttgatgcattttttgcatatacagtatagtatttaagttaataaaagttcagtttttaatatttatggttttatgttttgtttgtttgtttgttttttgagacagtctcactctgtcacccaggcgggagtgcactggcacgatcttggctcactgcaacctccgcctcccaggttcaagcgattctcatgcctcagcctcaccagtagctgggattacaggcgcccaccaccatgctcggctagtttttatatttttagtagagacgggttttcaccatgttggccagcctggtcttgaactgctgtgctcaagtcatctgcccacttcggcctcccaaagtgctgagattataggcgtgagccactgcatctggtgtggttttttttttttttttggtgaggagtctcactctgttacccggctggagtgcaatggcgcgatcatggctcactgcaatctccacctcccgggttcgagtgattctcctgcctcagcctcccgagtagctgggattacaggtgtgcaccaccatgcccagctaatttttgtatttttagtagagacggggtttcaccatgttggccaggatgacctctatgtcttgacctcaggtaatccactcgccttggcctcccaaagtgctgggattacaggcgtgagccaccgcacttggcccatttttttttttttataaatcataaaaaaagtaatggatattttaatttgtgtgatccatccctttagtttatatatgatgaagttgataggtaatgtggtcgataacggtactgagtggcagttctgagactaaaatccacatttcttgaatcccaaatgccaagcactgtttcttctagtgttaagacttttataaatgaggagtattaccatgtctttgatttgttaatttttaaaactggccattatactaacatacttttgttgataatatctgtactatagcatattattttttagtctttccccatatttgactcctagaatctccatgttggcatgcattgatatttctaaattttggtctcaatcctttgaacttgtcagttgtttttattaaacttatgttccatttacagtaccatcaggtttcttatccaatagtaagtaaaaggaggatgtttttttcctctgtattcgttgactgctcttagccaacactaacacccatttcatgaagtcttttgtctttatccaagtgttccactgtgccctagcagtgcagtgcagggtcatggcgcctgtctctttttcttcacatgaaattaataacttgctccagcagtagtttgttctaggacatttccagagcagatggtggaaagttcttgggataatatggcagccaaagcagtattttggctttttaaggttgactttgttttggtgattgtgtaatgaaaatcttctgacattaaaacaagaaagatctgttgaattaaaacatttttcatcttctaaaaaccaccacactcagcatggtagaattttggtttctttcaagtattggcctctctggctctttttcctgattatttggcacttaagatagccaaattaatatatttttaattttgtcttcacagaaatgtaacattgcttttgaattcctttttaagagcattatagaaagttacgggaggaaatgccattagaggtcctcttgcacagtgtacttatttacaaataagaaaactgagacgcagagaagttatttgttgaggttaacagagcgagttaatagatgcttagaagcaggccctgactttcttcatttcgaatcggcgactcctgcagcatatactgcttgtgattagggtaacttcgtttttttctttgcttttatttcaatatgttatattttaatgaatagaagttcagtttttaatatttatggcagtcttctgtttttagttattaacttaatttttatatagatgatgcatttatattattcaaaaatccaacacataaaagtatgcatgaacaatctccctctcatccttgtctcccatctccctagtccttccattggcctccatagttaactgctattcttagtttcttacttgcccttataatttttcacaaatatagagatgacctacaacttaatgataatttgacttatgattttttgaatttacgattatgtgaaagcgataggcattcagtagaaactgtacttcaagtacctatacaactattttatttttcactttcagtacagtgttcaataaattacatgaaatattcaacactttattataaagtaggctttgtgttagatgactttgcccaactgtaggcttatttaagtattcatgcatgtttaaggtaagctaagctaagttataatataataggttagggtatttaaatgcatttttggcttttgatactttcaacttacagtagatttattgagacataactccattattagtcaaagagcatctgtatattcagttatgaatatagattcttatttcaccttgcttccacataaaaggcaggaaattctacatattgttttgaactttattctttttctagttaacattctatcctggcagttgttgtacactatatagaactttctcatttttattttttaaataacaacttcattgaggtatattttaaatactaaaattttcaccctttaaaaatatacagttcagtggtttgcagtatgttcacaaagttgtgaaaccaacaccactatctaattctagaacattttcattatccaaagagaaactgtgcacccatttgctaatgggcctgactacttcaggcctcatttatccctctcttctgcccctagtaaccactcatctgccttctgtctatgcatttccctattctggatattttatgcaagtgaaatcatacaatatatggcttttgtatctggcatttactttgtataatgtgttcagagttcattcatgttatataatatgtaccagtatttcattcttttttatgctgaaaagtatcccattgtctgtatataccacattttgcttattcaccagttgatatgcattgggtttatttttactttttggccattatgagtaatgctgctttgagcatcaatgtacaagattttgtgtagaaacgttttcagttcttctggctatgcatctaggaatggaattgctaagtgatatggtaactctgtatttaactttttgagttaactgccaaacttttccacagcagtttcaccactttaccttcctgccagccatgaaagagggtttcagtttctccacagcctttctcactcttcttcaaaagctatataatgttctgttgtagatcagtgtcaaaatatatttaatcatgcccttattgatggacattgttaatttgtttttgctcatatcctttgctcaggttgtattgccgcctctgttgtatctttctaaaaccctttctgtgttagaatgtaaatatttttttcagtttgcctgttgacttacttgcttataggatatttttgtttttatcatgatgactttttaacaattttgaataatttaaatttatccatcttttatagcttttaggcttaaggatctataagctgatttagttttacctttttaaacctcatctcttactactcttcttcttgcagattctattctagccctactggcctctttgttgttccttaaaggtactaggtgtattcctaccttagggactgcatgtggtactaggtgtattcctaccttagggactgcgtgtgctgggccctctacttggaagacacttcccttgccaccttgcttctttcaagtctttgcttaaatgtcaagtccttgttgaggtcttcttatttaaaattgtaacacacctgtgataggttgtcagtagtcccccaaatttatcttctttatttagagtttagctggacaacggctgtccaggtagagatgccatttatcaggattccctgcagctagatatggatgtaccagaagaagagatatatgcttttacattaaaaaaaaagaaatgacttgccttggagtgcattttttcccccttctctttggtgggaaattataacaactggcacaaactttgaagcacatgcaaagggtagtagagcttccctcccagcatgggccttgtgtattcttatcaagtggagcctacctgatctggattattttctggattatgatatggcagagaaattaactttgatcctgttttaaatacttgaactttagacctctttgtcacagcagcttagcctgttacttaaccttctaccctaacctggcactcttggtcctacctttatacccttacttttttcatagcacttatcttttaatttaatgtataacatatttatttatctgcccctctagatttaagctctgtgaagtttgtcttatagtagatacccaatgaatgattggaaagaccttcactaaagcatgttataaaggaattcttccatttctttttagatttaaacctttgatatatttgggatttatttttgtatagagtctgtggtatggattcaggtctttttttttttccccaaaaggttatacagttgtcctactatatgtattaatgtccttttagaatgttactaatgaagtcctattactaacttacataaaaatgatttaaaaataagaaatgtctactcttcttcctgatagatttctcacgggagagataactgcagactcaatcatcatcagatcaaaaggagattttttttaaggcattaattcttgttttctctaaatcttgtatttttattcgtattaagtggtgtgttgacatgtgacatctcttgttctttggcttgtagttacaggctattttgtaaacaatcaagaataacaaagtccaaagtcttgagttatgaatatgagttagccaagcagtttggaggcagaaggggaagttgaagccatcacagagacttaggagatgtgagggaacgtggtaacgaggaagcagtagttgatggatagttgcattttgcccacatgtttctttaaaatgtatttcttaaatggctgttccagggtttttctgtttacatcattttttccccagatatgtagaacccaaatttgggttccttatttttaaactgacttttgaaaaacatcagtcatcttcaataccatttattacagaaaatggattaaatgaaggcatgggctactttgagtaagtcttgtttcaaatgaatgttgagtaattatttttgttgttactactagttctgttactgtggctccaggagtctagtgattttttttttttttttaatgtggtgtagaggtggggtcttgtatgttgcccaagcctgtcctgaactcctggcctcaagtgatcctcctgcctcagtctcctaacgtgctgggattacaggcatgaaccagtatgcccaggcataaatttttctgcagagtgttaaatcataaaaaagtgtttagaagctgggagtttcagatatttttcatcatttaaaatttgtacacgaatggatgtatttttcttggttttggtaaaatagtattaatttctcactgtgcctgtgagcatagttgaagagactattcaaaaatatgtgagtattcactggttgtcagtccttgttttaggtgctagggatacaatactgaataagatataaattctagttgcgagtgggataggacagacaataaacacattaatatgtaatgttaggatgtgataagggcaatgaaagaaatagtaatgtgatggtattttagccaagatcataagggagggcttcttgtgaagtggaccttataataaagtcaaagacagagtcctgttactgtttgatgggagagtattctaacagagggaacagcagcttcaaggccttgaggcggtcacatgcttggtatatccaaggacactaagcaagccagtagagctgagcagaatgagcaaggatggggagggtatgtggtagaagataagttagtatggatgcagaagtcatacagggtcttagaggctgagttaaggactccgagttttattcttagtggggtgggcagctgtgggatggtgattatccttgtctgaatatttttgccctgtgtatttaaattttcccttgctttgtggttataagaactatcctcagacaacaaaaattggaaattaggttcttgacatctttgcccaccttctccccacaaaatcattctgttctcgctatttttaatatttatacctttgctaccatttgaagctgtgcttcattgtgtatacagttatgcattgcttaatgatggggatattgtgagaaatacattgttgggtgatttcatcattgtgcaaacatcatagagtgtacttacataaacctagatgttatagcctgctacacacctaccctgaatagtataacctgttgctcctaggctacaaacctgtatagcatgttactgcactaaatactataggcagttgtaacacagtgtaagtatgtatctacacatatctaaacatagaaagggtacattaaaatatggcattataatatggaagcattatcatatatgtggtccattgttgactgacatactgttatgggacccatgactatatttttattatcctcacctcccctcctaatctggcagatagtataacaatgagtaatatttttatgctggctggtaggcaaatttttggttcttactgaaattagcacataatctgattcttactgagtgctagtgataggcagactaatgccattccaaaccccaaagatgtacatgctctaatccctggaacctgtgagtaacataacttatatgtcaaaagtgatgttgtagatgtgtttaaagttaaagaccttttaatggagagactgtcattcattatcctgtcgggcccagtctaatcacatgagtccttaaatgagcaaagcagagtgggtcagagagatgtgatataaggagtcactcaaagtccttgcttccttcgaagatggaacaagagatccatgggccaagggatgtggtgacccctagaagccaagaattgccctcagtttacacccagcaagaaaacagggacctgggtcctacaaccacgaggaaatgagtcctgccaaaaacccaaatgaacaggaaatgaattcttctttagagcctccagaatggaatgcagcttgccgacacctggattttaggctcgtgagacctgtactggacttctgactcccaggactgtatgataacaaatggtgctgtttaaagctgctacatttgtgatgatttgttaatggcagcaatgtaaaactaatacagtgctgatagaacatattcagcttctcaaagcagacacctttagcaaattagatttaagtacagtattttcaatggttcattcattctaatatttgttaaatacctactattttctgggaactgtgggaggagctaggaataagaaaggctcctgacttccccaaactcatggtctacagtcacttcataaatagtcaattttttaatttatatttttgaatttatggaaaatttcaagcatataaatatagagagaagaatgaaactccatgtgcttgtcactcagcttcagtaactatcaactcatggccactcttctttcatgaataccccatccacatccaccctcagtgacacaaaggaaatacagaccttgctttttattttatcattttatcatttttttttttttttttttttttttgcgatggagtctcactctgtagcccaggctagaatgcagtggtgcgatctcagcttactgcaacctccacctcccaggttcaagcgattcccctgcctcagcttcctgagtagctgggactacaggtgcctgccaccatgcccggctaattttttgtatttttagtagtttcacggggtttcaccgtgttagccaggatggtctcgatctcctgacctcgtgatccacccgcctcggcctcccaaagtgctgggattacaggcatgagccaccacatccagcctttatcatctttgtcatagtataatttatctgtgaattcatttggaattttttactttctattttttgtcatgaaatttggtctaggatttttttggtgcaagttagaaaattaatgtagattagttcagttagcagaagtgctgcaatagtgatttgggggttacaaataaattttagtgaataggtgattttacaaatacagaatctgtgaataatgagtgttgactgtatatatggcaattttccatttcctgtgtccttgatttagttaatggcatcaccatctctgggtgctacatttagaaagcttagtgtttcttgattaatctgtttttcttacccattttaagtgtctgatctgtcactgagtggtagtagttttattttattaaatgttattcaaatctgattgctttttcattcatgttgtcactgttttagtggatgtcctcattatgtccccccaaatgatttattgcacatgtcttttgtttcctggattagtttaaacattttctcacatcagtatgttccccatcctcttatgtgtcctttcatcccacaagccctggttttagactcatcagacatagggttgaatttggctatgtgtcacattctttagcactattatcatcagctcctgtaaggcctgtcctttcctccatttagtattcatccattcatttattctcttttatctccattccctatttccttttctttcccatagatagccattctgatgtgtttaatatgtttacttctacatatgtatgttcaggtacaaaatgttattcgtatgtgtacatgtatttttaatgtatgtaaatagaattgtgttatagaactcattctgtttttttttacttttttcctctcaaaactgtttttaagagttacttgtgatgcaaagtgaacatttagtctgtggcttttaaaacttctccacgtgggccgggtgcagtggctcacgcttgtaatcccagcactttggtaggccgaggcgggcggatcacgagatcaggagatcgagaccatcctggctaacacagtgaaaccccgtctctactaaaaatacagaaaaattagctgggcgtggtggcgggtgcctgtagttcacagctactcgagaggctgaggcaggagaacggcgtgaatccaggaggcggagcttgcagtgagccgagatggcgccactgcactccagcctgggcgacagagcgagactctgtctcaaaaacaaacaaacaaacaaacaaacaaaaaaccccaaaaaaacccaaaacctgctccatgtgtggctccgcctcattttacttatttaattcatcggttatacccggattgcctccaactttgcatgcccacaaataatggatgtttcgtgttgttcatctattgctgcataaaaattacccaaaacttagctgtttagaacaacaaatattattacatagttttttagggtcagagatctgagtataccgtagctttaagactctgactcaaggtgtcacatgaagttgtagtcaagctggggctctggtctcacttgaagcctcagctgggggacgccttgcttcctaggtctcttggctattggcaagagtcagctcctcaagggttggactgaggacctcagttcctcactggctgttgattggaggcctcccttagttctttgccgtgtagacctctcagtatgttagcctacagcaaggcaactggccggcaaatggaagagcaagaggggctactcaacacacatcgtagttatgttgtaagctgatctctcaaaagtgacataactctcacttttgttgtattctgtgaggggaggggattacacaagggcatgaatagcaggaagcaggcatgattggggtcattttagaggatgcctactatatttctcagacatatctctgtggatttttctttggcacgtgcgcatgcacgcgtgtgtgtctgtgtgtctgtgtgaatggacataggttctctaaaactgactatgctggttagtattcccatcagcagagcatgagggtttttatatcaccacatgcctggcaacacattacattctctagggcataggggcatatcaccttgtttcagattgcctgtttatatcttttgattttttttttctagcagagttcctgcctttttattggttgtttgcaggagttatttgtaatagccttgatattagtttcgtgttcttctttcagtctattatctgcctgttaactttgtccagggattcatttgctgagcagtaatctttaattctgatgtaatttaatgtgtaatttttgcctttgtggtttgtgttcttaggcttttatttaataagtcctttcttgtgcttatgttacaaacttattgtactcttccttctatcaactttagttttattcacatctaagtcattaagtcttctgtagtaggtcttgagtatgttgtaaggtgtagggatctgtcattatgaaataaaagaggtgtttcccattaccatcttctgtacaatgtgtttttcttcattgatttgtggagtaatcgtaatctttattgtatattatttccatatatacacaggtctgtctttgaattatcaattggggtcctttggtttgtttactttttatacaaataccatgctgtttttcttactacagctgtatagagtggcttgatatccagtagggaaagtgcccctcttcattctttattgtcaaggttgacttggctatttgtttattatttcataaaagtgagtcaatttatgcagttcctcaaaaaagtcgagtgagaattttggttgtgattcgttgactttctgtattaatctgggtagaattattatcttcatagtattgtcattctgttcagatcatccactgtgtcctttttaaatgtttttcttcatagatgtcctatgaaggaccaaaacattttattccaaacattttagttattctggcagtcttgcaaaatgctgttttgtttttgataacctactattgttggttagtgctgctaaggagaaatgctatttatctttcaaagttgatcttgtatctggcctagttggatttttaaatttatttgaatagtttcttgattttttaataactgttttaatctaacttctccaatatatacatactttttccattttattaatttctcaactcccagttcgagtccctttgctcccacccctttcccccaccttcttttaatctgtttgatcgatattgaatttcttattttccttcaaaactaccagacctttttgtggctgcctttgtatggtttcttcactttaatgcccttccccttcttcttgttcttcgtctgctcaaatatcatcatctttgtgaagaatttcccttctgacccaggcagaattggttgctgttatctctgtgttcctaatacagatagttcatattctttcatgggatttgccggatttcatagtaatttctttttctatgtttgattattccgctgactcttcactaggactcctctctttcttctctcctttttgctccttccccctcaatctcttgtcactgctgtgatgttctcaatctcttgtcactgctgtgattggctatgttctcaggcaggatccatcgacagagaaaaccagtagcagctctatccatacatagttcttagcactcacaatctcagaaggagagagtgcctcttttctgatagttccagaagtgctgggaaggattttgacaaggaccatttttattggccaaacgtggatcaccagaaggcagagtcgtgccccatccaatccacatgtatggaggggagggaggttctcaggaggacaaaagggctgcttttgccagaagaacaggaggtggatgttggtcaggcaaaatcaacagaggacagctgtaagccagtcaacaacattctggatccttctttcatgaaattccctttacatttttgttgcaatgagtattccatttgtgcttatgaatacatattacctgacctcagcattcttcttcctctttgctatcctaagttatatatgccttgtacgctttgctgatggatctattaaggaaggtattcaataagtttccagtcaaaatgaaaacagtaaagatccctccatctttccatttatttatccattgagtacctattatatactagagttgagaatataaacaacagcaaaaatgaaaggttctctagctagagtctcatatattatagtaagaaagatttgtaagtaattgccactcatactccaggttttaaatgccactttttaagagacgctttcttttgatcccatagttactatcagagtgtcctgtaatcctctcctgttattacttgtttttttcctttatagtcctttttggagtgattattatttgatttttcttttttccactaaattgtaagcttcataaaggcaggagccttgtctatttgttgatggatatgtccccaatatgtagcataatgcctgtctagagatagtaagaataaatttttaatcaatatttgttgaacatcatatgagcaaaaatactgtgtgataagcaatttgatataatttgtttctctgggcctacggaagacacacatggttctgtttaggaatttggggaaatgggtttttagcttgcagtgactcttattgtcatgttgtattgcttcagtattcttatgtgctggaagctttccttacctcccagcatcaaaccctctactcttcattcttctacatttataggattccacggtaagagaggatgatccaaggttaacactttttttgttctctcacttctgattgtgtttggcccaattaattttgaaggagaagaacacttttttctaaatacgtattctttccctaaggttattagacctagtaattattaatagtcatagattttggtttaagcaaaactaaaacaatttagtaaaacaatttgtttctagatctgaggcatacagtaagatgttaaattgtaaaccaccacagctgattctttattattgatgcaatgacaaaatacatttgcagtctggcacgatggctcatgcctgtaatcccagcagtttgggagccccaggcaggcagatcacttgagcacaggagttccagatcagcctgggcaacatggtaaaaccccctctttgtaaaaaagacaaaaattagctgggcatgatggcgtctgcctgtagtcccagctacttgagaggctaaggcaggaggatcacttgagcctgggaggtggaggttgcagtgagccaagatcgcgccactaggtgtcagcctaggtgacagacacagaccctgtctccaaaaagaaaaaaaaaaaagacagaaaacgtttgcaaatgtattggacatagtcatccatctgcctatctaaataggctctaactcacagccaagtatttgttatgtcaggatttggctttaaactctgacccaggtgaaaagcctagccaggagactattgtgtatggattccagacaggcgtgggctatgttttgaatgaatgattattgtgatacaaaatttttgggggttctgagcacccaaatcaaatcatcattagtaaatcataacatgacatgaaacatcaagtttgtctttcattcaattcatgaaagaagaacaaatacaagaattgctttattttattttttaaattttttatttttattttttgagacaagagtctcactctgttgcccaggctggagtgcagtggtgtaatctcagctcactgcaacctccaccttctgggttctagtgcctcagcctcctgagtagctgggattacaggcatgtgccactatgcccaagaattgctttttacaggttaatttttacaacagtgattatggaaatttcaggaaagagattgttctacaatactttaaaagtcagatttctgagtagagctgagctttattcaaccacgtaataaggctaattgcgtgggtctcttgtgtttttctttttttatatgtcatttttaaatatatttctttttctttctttattttttgtttttgagatggagtttcgctcttatcgccaaggctggagtgcaatggcacgatcttggctcactgcaacttccgcctcccaggttcaagccattctcctgcctcagcctccctagtagctggcattacaggtgcccgccaccatgcccagctaattttttgtatttttagcagagatggggttttaccatgttggccaggctggtctcaaactcctgacctcaggtgatccacccgctttggcctcccaaagtgctgggattacaggcgtgagccactgagcctggccttttaaacatatttctatcagtaataactccttaagatatctggtagaatttaaatttttctagttctagaatcaagtcatcattaatttgtttaatgagctttcatttaagtaggtgttaagtatttttctttgtttttcataattatttcatttttataaaaatattttagtattcttttggtgctattgctctttttactgcgttgttgaggtttctacttccttggtcttaacatgttccccattataatcctgtttaaacttttgcagtaactggaaatttctggatgcctttattcctctgtgtgctttctgttcagctgaatctttttctttttatttgatctaagacttgtttcccaaaggggtttatgatcttgagaggacagagtaacccttcataatcaaaatatgcttaataaaacaggaataacttgtttactgttaatattttgctgaacatgcaaagttgaccttgagaaaggtaggcactagagacacaagatctagggtgtattattgttctgattgtaaagtgatcatcaacgtgaaaaggcattgttttcttccctacactgtaccttctcttcagctttacaatctgagtatttgtctctgtattatcactaaacagaaatgaacatagatgtctagagtgaatcttcaaaacagaacactgctagtaactatttccattatacataaatagacttgtcatttaataggagatggaaactggaaaatagggaaataaagggataactaacccaaatacaccagctaatgacagggaaggagtttaatatttttgcttgacttaatttttgtattaaacgtattaacatttttcagtaacctgaaaatactgaatatttagatttgagtttttaaatgtatagttcatttagaaaagaatagtgtcttaatcttccaaagtgactgttactctgtttttcttccattttagagatattacatatgaaatatcagtagaagctatatcaacaatggttgttttcctttcctgccaactcttccacaaagaagttttgcgacagagcatcagccacaagtatttgatgcgaggtccatggtatgtttctactttaagtatgtctagttttttcattgtataaatctatatttctagtcttgtccttttacctgagtatcgtcccatatctccaaccaggtatttcctctagttgttctattgtctctttaaacccagtgcatagggaaccgcattctactttcctgtgccatctacccatcctccctgttcttcctgtcccgtagcttcattaccttctccagtggttgcttcgtagaattgaaactttgaaatcatctttttcttccatctccttcattctgtctatgtttaagcagtcaagtcatatttgttattcagattatttttgtatcttcctcttctcagcagtccctttgaaacacctgtgatctatgcccccttactctctttggacttctccagcagcctcttcgctgactattcctacttctttgagcctgcaaatatttgctgtgtgctatccatgtgccaggcatgttagactgtggggctatgctcttgagcagaagcttacgatctcctagagggtgtggatgcaaatgaccaacacatatgcacatacctgaccttgtattaacataatcttcacaaaactttaaaaatgtaaaacaaatccaaataaagtacctttgaggaaagttctcagatagtggggagctttgtcttcttcatattctttttgctaccctgattattcctgtggcatgtatgttctttgaacatatttgaaaatcactgagggaaaggatctgggctttggagtcagaggtttgcattggaaccctctctgacagagacactcagaatgacactcagaatgaccgtggtttgaagtagtgctggcatcgtgggactgtgtgcatctttgctgaaacaagattgtgaacttcatcccttatagtgccagagtattcaagttgctttttaaaaatagacatagagggtgttagtgttcttattttctaagtaaggtttttatagtatcattatggtgccacatatttaaaccgtaatatgttctttacttatttttggggttcatcttggaaaccatatttaaaaagctcaatagtacattaaagaatctgttaaaaagtttactctagattgcaggaattagtttaataccaattgaataattgaataatttcatacttaaaaagtgtagtcctattgttatttttaaattcttgcttttttctactgattctttattactacttcccttcaattgccagataatgtgttatgcactaaatttataatagctcacagtgttataccgaatgtagataaagtaactggagttcaagagttcaagtgggctgggcacggtggctcacgcctgtaatctcagcactttgggaggccgaagcgggaggatcgcttgagtttaggagtttgagaccagcctgggcaacatagtgagaccttgtctctaccagaccttgtttctccccactgcagaaaaaaagtatttaagtaatttgatcaatatcttatgatgtgataagaggaaaagcaaggattaagcctcaaaattgctctcaaagcccatggtcttcactgttgtgtgcagtgctcaatttctgtgagttgtgccaatagcccttttgtattaacagatagtgttaatggcagaattatttctgtattgttattcagaattagatgactcccataaatatgagtttgatttttttttcctttttgtatagtcttccatacaccagcaaacttgtgaagaccttattatataactttatcagacaagaaaagccacctcctccaggggcccatgttttccctcagcagtcggatgggggaggactgctttatggacttgcatcaggagtagcaagtaagttttatcagattttttcaattctttggtgcacataaattttatctatttaggcataagaaattctgtttgcttggctgccaccattaatagttacattgaatttgtgcagctggttcaatgtgaaaacaaagtaattaaaatattaatctttctgttttgtgcggtgatttatgtaaaatgtatgcaaataatgaatggattacctacaaaacatcgtttttcaggaagaatgtttacacataaatatgcgtattgcatgaattgtagctgtatagtaaaaataaaattaagcatttgaaaacttataacactacttgtattataagaggaaatctattttaggttattttagggtatattttggttaggatttcatgtgactaattaggtgcagttttcctattacactaagtgctttcttcagtgacaactgaatattttgcagaattttgtaataagctgtgaaatggcacaaacttgagttttgtttgattgggtgcagatttcttaagtgaagaaagctcttccctaccttacaataagtcctcatttctgcttcacttcacagtattcagactacagacactagaagtaagagagtagttctggtggagggcctgggtcatgtgaagttatataaatgaaacttcctagagcgacactttggtacttgtgaggtcggcctgggagttccttactcctcccaaacctgcagcatgtcctctccttaatcacgcaggacagagtcaaatggaacacatttccacagctgcattatggctgtggcgtgctctacactccagctggacatcagtttgatatgaaaaggtagcactgtgataacttactagtgttgggagcttctttggattcagagacctcttcaaaaagcagtagacttggtctgttaattgacagaaatcagtgaaccagactttcttagatttgccttcctttgatttcttttaatattatgaattgagtcacacttgtgatcacttctgcctttggtgctgagcagcctgccaagagtgccacacctgcatagattctttgagttactcctatccagtttcctcattatttcaggggctttttgtgtcccattggaaggcttaattgatctattactgttttcttttttaaaaatcattaaactggtataagtatttaaaagctgaatatttcccaatattccaatatggttagaggtttttttggggtggcagagatagtataagcctgtaagtgctttcttcaaaacaatggcaatacttggcagttttttaaaaaagtaaacatggatttgtgtatggtttttgggttttctttcagttatgtatcatatcaaagggaacccagtattgcatgtggtatcattagtgtgccaggtgccaaaaaacatgaatttaactttagatcttttcctaactagatagcaggaaggaagccccttaattttcctagctctcagtttccttgtctatctaattagaaggtgggttgagatggtgatttctgagattattactacataattttctatggtcttttttttctcacggttttaaaatttaatattcagttaagtgcattaaaatagatttatggtttttagtgtgctatatagtcacaagacattttacacagctttcttcctaaatctttataaaactattcatgtaaaagtataaatcaagatggagtaattatggattcattatttcatgatatgtgtgactcaaaggattataaaaaaacaacaaaaggacattctcctaaaaagcacagctacgttctctgggcaaaatgaaatgtaaaaacgatcacagtcatgtaattttaagttaatccacattccaggaaagtcaatcaagttgccaggatttgacttaagttgtgtgatcacttctgatgatcttttggttggtagttaaagaattctcttactttactattggcttgagaaaatatgatttggaagttcctcactgaaaaaaattatattccaaagccaaatgtaaattataaactcatttggattatattcatttttgttgggattgaagttttcctggatatagcaagcatttcttttcatagcagtgtgtgcattgtatgtgttgcttacattatttcctttgaaacagagtgccttgttgtagaaaaccttacagttccggagtgaaatttgttgtcactgacagggcaggaggagaatccttgtactggaactgcggctggatgagtagtgaaccacttgcttggaccctcctatgagtcaggcaaggccttctgcagtttcttctcatttacttttacagatgtgtttttggttatccttttgtttgtttctgagactctgtgaaagagtctgttactttgttgcaccctgatactctccttttgctttcttctttttttaaattatactttttctagggtacatgtgcacaacgtgcaggtttgttacatatgtatatatgtgccatgttggtttgctgcacctgttaactcgtcatttacattaggtatttctcctaatgctatccctcccccctcacccccaccccacaacaggccccagtgtgtgatgttccctgccctgtgtccaagagttctcattattcagttcccagctatgagtgagaacatgcggtgtttggttttctgtccttgaaatagtttgctcagaatgatggtttccagcttcatccatgtccctgcaaaggacatgaactcatccttttttatggctgcagagtattccatggtgtatatgtgccacattttcttaatccagtctatcactgatggacatttgggttagttccaagtctttgctattgtgaatagttgccacaataaacatatgtgtgtgtgtgtctttatagtagcataatttataatcctttgggtatatatccagtaatgggatggctgggtcaaatgttgtttctagttctagaaccctgaaggaatcgccacactgtcttccacaatggttgaactagtttacagtcccaccaacagtgtaaaagtgttcctatttctccacatcctctccagcacctgttgtttcctgacttttcaatgattgccattctaactggtatgagatggtatctcattgtggttttgatttgcatttctctgctgaccagtgatgataagcattttttcatgtgtctgttggctgcataaatgtcttttgagaagtgtctattcatatcctttgcccactttttgatggggttgtttgattttttttcttgtaaatttgtttaagttctttgtagattgtggatattagccctttgtcagatgagtagactacaaaaattttctcccattctgtaggttgtctgttcactctgatggtagtttcttttgctgtgcagatgctctcttttttcatgccttcactaggatagaacagttgcttggagtcctccttacttctctctctggctctttattttctgcccattcatccattaaggaccgtcttgagttccaccttctccatgaagaacttcctttgctctcctggctagatgcgatcttttcctctaacgctttaccactataccactctgctttgtagtaacttatgtacatgcatcattctccctgtgttggctccacatacaataaaatgagaactaatgtttatataatatgagtttacagtgccacgttttgagcatctcatttattctcataataggctcatctatcagaaatagttggttttaattttttaatgatggatgaagagattttcctggttagtatgttattttgtctaagattacataggaaatagatgatgttggctcgttaatttaagctcagttcatcagacccctgagcctttgctgtttttgccttttgttcttgtgatcacccaagtcctgagggcataagctccttgacttgtgtgggtgtcccctgcagtatccagcagagcgccatccaacatctgtggactgtagtgaatactggtgtgcaattaaatgccaaaagctcatactcaagatagatgtgaactcagttgtaagaatgatgtctgtcatttgctgaatgccttctgtttgccaggcactgtggtagctactttacatacctgatttcatttattctttatttttcttttctaacattttattacagaaaatttcaaagatgtatagagtagatgccaggtgcagtggctcatgtccgtaatcccagtgctttgggaggctgacgtgggtggatcgcttgagctcaggagtttgagaacagcctgggcagcatagtgagacaccacctctataaaaaacacaaaaattagctggacgtggtggtgcgcgcctgcagaccccgctacttaggagtctgaagtgggtagttcgcttgagcctggaaggtcgaggctgcagtgtgctgtgatcacgccaccgcactccagcctgagtgacagactttgtctcaacaacaaaaaaacaaaaacaaaacaaaaccctaaagatatacacagtagagagaatggtagaatgaactcccatctacccacaacccctgctcaagaatgatcaacaatctttttttcccatttatctgcattctcctacttaaaaaaaaattttattttgaaataagttcacacatatagaaaagtccccaaaataaaaatatcacaaaaaactatatgtaactttatccagattgatttattgttaacattttatcccatttgttgtgttttttctcctcttctgtctcattctgtactttcttctctctctctccccctttctctttctctccccccaccacacacacacacacacacacacacacacacacacacacacacacggttttttaaaatcatttgaggataagttacatgcatcgtaatatccctttactcctaaatactttaatgtgtatttcctgaaagaggatatggcttatgctaccacagtatacttaccagcttcagtaaatttagcatccaactgtccttaaaagccatttgcttctacgtcaataaaaataagaaaatggatattttcctctgtattttaaagtctcctttattgagtatagcgttatttgtatttcacttaagttgaatttttacaattaggtattcttgtaaccactctgctatcaatttatctatcttacactaaaagccccatgaggcaggatccacctctcttccttctgtttattattggcactgcagtactcagtgagtgcttggttggcattcaatcagaatgtaataaataactggaagaattactaataccttttaattaccactagtaagtttttaaaattagtgtaatagaaattaacttatagattttaggttttttttttttaagcttttcaaatgtgtcaagtgtggtttacttcagtcactggaagtggttagaatgaattatatattaatatatttatcttgtgttatatctatgctaggtgcaagcaaagctgtattagtaattttccagtacaagaaaaaattgtttcctttctgtttagtttaactattcttctaatatgctgacaaaatggaaaaagaattaattgatatattactttactaattagaagagggtgttgcagttttaattaatttggtatttttaaatgaactttttactgaatcatagaattccagaaccacctggcatacttaaaaaaaaatatgtgttgtagttagaacttggagtttctgattcattagacatgaggtgggacctggtaattcgcaccttcagtaattattctaggtgattctgatgtatccgagtcatttcagcaccgctgatgaatgcatcctcctttccagttcctgaatctcttctgctgtgggcctttcatggcatgtggttgagccagtactactaactactgaggaaatgtgttgtttcgaggcagcttatggtggatttaatggacccctcctcgtgtattcccttggtttctgttcttagtgtgctctgttgctgatgaggtccagttttcaggataaatctgacaatgagtgcagtactctaacatggaataaataaattggaactctaacttccctgattctggactctacgtttaaaaaaataaatctaaatgcacactaactcttttggtgctaatatcagttattaataaattttttgcctattttatcatctaagccttttccagatctgtagtttttatgtgctatcttcctttttcaaactttatatataaaggtatggctctctgtgtagctcagtgagattcaattttgttaggtgtgtggcccataattacagccaagatttgctcttattttcagctgcagatgatcattaaacctatattttggggctttttgcttttcttcaggattgtgtccttggtaccatattgagagaggagtagcacattttaattcttgtgtggagagcagagtgtttctgtagctgtcacgtgtaaaataacaacaaaagtgaatgtaactagggattttttgactgttttttatagaatagatttcatttgctggaagcctggtaaggatttgctgtgaggtcagtcgcctgggttttccaggcagcagactttagagttaataaggaacaaggattcctatagtttcccctgtgttttaggacttacccacaggaatctttgcaaaactggagctagtagtacacctggtggtgggaggtgcctgggagcctcttaggggttcaaatccccccaatatctcaccctggattattattatcccgggacctctcagatgccttttctcatctcccactcctggacatcctggtggctaagggtgggttctagagcctgataatcagaatcagaagatttgggatagagtcatagctcagcatgaccttaccaagttctccagcatttaaaatctcattaccttatgtgtaatgctgataaatatgagaccatttgaacagagttattgtgaggaataagtgagatattatatacaaaatagaaaattatacaacatctattcccatgtaaataactgtttttgttttctgccctgaagctgtgctggtgcttattagttaaaatagaaagaaagaaaataaatttaattagaacaacagctaatgatcagaaaatcctggacaaatttatataagacaatttaaaaatttaagaactttgaatctttttggtctgctcaaatttgaaatttatgttaaaaatatttttgaaaaactgacaaaagtgaatatgccagccatgttttctccaactggcttttcattttatgtggtgcaaaatttggccaataacagttaaaaaaggaaaatttgattgttaaacagatattgcccacaagagatttctccttgcttcctaagtgaacttgccttgacaacaatcactatggtaccatttcttattgactaatttatctaaaaggttattatatttgccttgacagtttgtttataaaatttgccaattaaagattttcataaagaaaatatttgatgcagactcaactggaattacaataaatatttcaaatgtttcaaactaatcaatgatatcagtattatgggtagccttaagtatagtcagtacggcagttaatagttaattctttctttaatctacgagcacatcaccctgccgtgttaaagattttttttttttttttttttttttttttttttttgagacagagcctatctggctctgtcactcaggctggagtgcagtgacatgatgtaagctcactgcaacctccgcctcccaggctcaagcgattgtcgtgcctcagctgcctgagtagctgggattataggcacctgccaccattcctaattttttatgtttttacttgagacatgatttcaccatgttggccaggctggtcttgaactcctgacctcaagtgatctgcccgccttggcgctggaattacaggcatcagccatcatgcccatccgttaaagatgttttataaagcaaatgactgaagacccttacttccataatttgttatgttatgggacaggatgttagatggtaaagtattgtcttagcttgggctaatgtaacaaaataccgtaggctgggtgtcttgaacaacagaaatgtatttctcacagttctggaggctgggaagtcagagatccaggtgccaggagattcacttcttggtgtagaaccctattcctgacttgcagatgtccaccttcttgctgtgtcctcacagggcagagaaaggaagctctggtcttttcttttgagggcactaagcccatcatgggggctccactctcacgatctcatctaagcctaatcaccttccaaagctccaccttctaatcccttcacattgagacctgtggcttcaagataggaattttgagggtgacacaaaaattcagtccataccaggtattaagtagcttgtgctggaatgctcctcactgaaattctcaatttggaaggctactgatctcttctgcatgttggcatctaaggtacctttcagctctagtcattatcttaaaccacagctctgcttagtggtgttggtgaggactgtggccaaagtggatcactcactacccattctaaccctgctaacttgtttttttgttatgttttgtttttgttttttaaaaaacaaaaaacaaaacaaaacaggccaaaatgtgtaaggagcccctcagaaaacaattctgtgattgaaacacgttattctcttttctaattttgagggccaccacttacattgtcctttggaggatctagctatgggttacaataatttggtattacagaagagggacgtactggactgtagatgtttgtgttaggtagacctggaattgaatgccagacctgctatttattaactgagtgttcttgggctattaacctttcaataacttaaattcctcacaataaaatgagaataataccttcctttgtggggctgctgagatcaaatgagcaaatgtgtaggaaaaagactggtatcttggaagtatacaataaatggtcactattagtatcagatattattacctggtaatatttaaaatataacttttgttttaaaaatactgaaaaataaaggccttatgatttccaagtttattcagatttttaatgtaaataaattatgaaaattatcagatgtttggtatatacactgtttatatattgtaatataacatacatataataatgtatacaataaatatataatagagattcaggtagatgatgaaagaaatatgttgaaaatttgataccatgaggtgaaataagttgtaacatttattttattttattttttttcatttgattctgtccttaccactttggacttttcttttaatatatttttctccaatgtctaaaaaaggggtgaagcaaggaagtgttgactttgaaatttcttctgtgttttaagttataagacaaagctgtaatgtcattataattatttcatattttgaagagtcaaatctaattaaatgtgttctgccaaacttcactttccaccacaagtactgaggttttacacaataacttctgatatatggtttttccatttgaatgagccatccaaaaaaattttttttttcctttgcttgcaatggtgggtgtccaagccaaattataaggccaaaggagtgtttatttctttaggcaaatgctatgatagagaaattcatacagtagaacttgaagattaaaactcatattcctaatttctgtttttgagaaagctgttgaattcattgtgatgggtatggtatgcagtaattataatgtattttacttgattgttatttttctcttcagttttggctttttctagggtgactcattgagagagaaaaactacagtaagagaaaaagtatgtggcaatcagaaacaggcatagttgtgaaaataacagatttctaattaaaacacttctaactttcaaaaaagaaactgcttaataaacaataattatattctcatttcatctctatttggaataatttgagagattttacgtgctcacagaaagaatgacttttttcccccccttttcaggattgaactcattttgtgacttataaaatatagttaatttctgtttactgtttctgtgcagtggttccttgcagggatacattgatgatttggaatagtgtttatgatgcaaaagaactatatttagttgtagagtagtaataaaaattattttatttttaattgctctttgacaaaagtatggtttcagattttagacttcttaaaaggtgttttaaaaatgatattcattggaaataatctaatgtcaaaatacagctttgttatctttttttcttgtaatttgctgacaaccacttttaaaccagttcccaggattggctttgggaatcattaagcccaccttctactctcattttcttgttaacagatttgaagggaagactgatggcctctttcatgctacaaatagttgaagaatgaattagtttgtatttacaaggaggaatatagaataaagcaatcaattgcagatgaaatcctgggataagtttctgagacttgctacaagtgccatttatttggtgctaatgatttaatctatttttgagactgagttgtaaattgtagaatttaaaaatatttaaaagtgagaatattaaaattgaaattatggaattctattttttgagactataaatcttattctttgaaaaatgaagtggttaaaacttatttgctttgaaactgttaaattatatcccagtcaagtgagtgtaaacttttattaagcagctgttttaatttatgtttatttcagaatggatgcttggagtaaatttaaagattaaatttattcaaggttactcactgacagaatttgtgtatggtaggaaaaatcctcaaactatagcttgtgtagttttgagactaccttttacatgaataattcttaatatttataattacataaatatttttttcgaagactaacggtaagagttattcaaaactttcccttttaaaatagaatcaggccagccacggtggctcacacctgtaatcccagcactttaggaggcccaggcaggcggatcacctgaggtcaggggttcgagaccagcctggccaacatggtgaaaccccatctctactaaaaatactaaaattatctggacttggtgttgcacctgtaatcccagctattctgtaggctgagatgagaggattacttgaacccgggagatgaaagttgcagtgagccaagattgtgacattgcacttcagcctgggtgtcagcgcgagactctgtcttgattaaaaaataataataataaataaatagaatcactgtgtttctgcaacttaactttgacatacattaataaaataagttacatttatggatgaatagagggattgatagatggatagagatattatcacaaatacagcaaaatgttaatgtaaaatcttggagctgagtttatgggtattcattatagagttttttgacttttctatatgtttgactattttcataataagtgttggaggaaaatagaatcactgtgaggatgaattactgttgtaaatttcagtttgtctattaaaaatgtatatcttaatctttagtccttccagaagtgctaggtaagacagtatatgaagaatgtggggtctgatcagacctgactgcacgctaataagctctatacttgggaaagttatgtaatttctccaagcttttccctatctttaaaaacggaatgatgatgctttataggattatggcacatggctcttcatttttcccctcttgtacttgttcataatctttgtgataccatggtccttaaagtcctgtcaaacacaattggacaagtggtggagagagagcagagtgccattcatcatggtgcttagcagccttcatctcacttctgcaggacacaggggtcccatacttgacaaaaggaagagagggagagaagcagctgtccctcttcactagcagggtggtggattggaagaggatacgacttttggcatcagaaaggtctcagctggaaaccaggccctgccttttgcaagttgagtcaccttgagcaagttatttaactttgctgagccccagtttcctcatttaaaaatggaacttagagtatctttgtctgtgggcttttgtcacatttaaataacgtgtgataagtgtccagaacaaaatgcgagctgaaaacaaatactcgtttaccattcacctacttcatctttttttctccctctcatctatgtcaatttctttagttttccaaacaaccttaaatgtttttatctttcttgtttcatggtcctttagcctttcagcttgcaaaattacctgcaaaattaatgtaatttccccttttttagattattaaaaaggataataagtgcagattaaccccagtagcacccttcaccataacttcatcaaattggaagccttgctagctatcagtatcatttttcaggcctattaacatttttcaggacaattaactctagtccttgtgctgtactttagatctagtttgtttattttagaaagtgtagactagcagatattagctttaagagagcagttgtcttcaatagtaactgtttgaaagtgtaaagctttgcaacaatgtttctaaaagtagaaataatgttacctatttatggccggttgcgtggctcacgcctgtaatcccagcactttgggaggccgaggtgggtggatcacaagatcaggagttcaagaccagcctggccaagatggtgaaaccccgtctctactacaaatacaaaaaaaaaaattagttgggcgtggtggcaggtgcctgtaatcctagctactcgggaggctgaggcaggagaattgcttgaactcagagggcggaggttacagtgagccgagatcgtgcccctgcactccagcctgggcgacaaagtaagactctgtctccaaaaaaaaaaaaaaaaaaaagaaaaagaaataatgttacctgttcatatacatgtttatcaagagagatgctatttgagtaactaaaaaattgtggggttatcacttacttttcaagataatttcttaaataaaaaattgtgggacccttatttttaaagataatttctttctctctctctctctcttttttgtggggggacagagtcttgctgtgtcaccaggctggagtgcagcggcgccatctcggctcactacaacctctgactccctggttcaagtgattctcctgcctcagcctcccaagtagctgggattacaggcacacgccaccatgcccaattaatttttgtaattttttttagtagagatggtgtttcatcattttggccaggattatcttgatctcctgacctctcgagctgcctgccttggcctcccaaagtgctgggattacaggcgtgagccaccatgcccagcttaaagataatttctagacctggtttgttctcaagtctcctattcttgtcttctctcagtttcccatattgttcggatccttcttcattgctcttggcttaatagcccctgcatttcctgccttagtttgcttctgtgtatcctgaacaactgcttgcatctctgggttgccatgatgctgtaagcaatggtggctccaggagaaacattgtggtcatgagtttgtggaccttggggcaagggtgtggggtatcaggtgtaggcatggagcagagtgaaatggagtagagaattagagtggagagatggtagggtctatgtagaatcatctgttttcctgggtagccattggttcttaaactgccctaggcttctctgttacctaactactatcccctctagaatatgaagaatgtgttataagcaggagttgcttattgtacctgcaccctcagtgcattagcagagagcctgggttatggaagatactaaatatttgttaaaaggatgaatgccatcaagcctttgttagaatgatatgagcagtcttgaaaatctggatggcttagccgggcatggtggcaggcacctacagtcccagctacttgggaggatgaggcacgagaattgcttgannnnnnnnnnnnnnnnnnnnagaggagaggagaggagaggataggagagggagggagagagggagagagagagggagagagagagagagagagagagagagagagagagagagagagagagagagagagagagagaaatctagatggctaaggactagggcagtaccattatatgagttgattgttttagttaaagacttttggcaaaccttcatttccaggcccacttctcactgttgccccatttcagatgccttctctacttctgcacccctgccaaagattctgtcaggaatttctttcatcctcttctctgagaatttgactgtgtctcaccacattcactgctaactttctaccaaaaattgttaaaatccatcaaccacttaaggctccactatcattctctttatggttgtatctttatccttttaattctttacattttactttaaaaattaatagactttattttttggagcagttctaggtttacagaaaaatgagtggaaaatacatacagtcctcatatacaaatttcctcttcaagtttccgctgttagcatcttccattagtgtactacatttgtgacagttgacaagccaatattgatacattattttggactaaagtccatagtttagggtttattctttgtgttgtacagtactcagggtttagacaaatgcataatttccccaaattggaagcaaccaagatgtccttctacagatgagtcaaactgtggtacattcataaagtggaattttattcagcaataagaagaaaagagctgttaagccaggaaaagacatggaagaaccttaaatgcctatagctaaaggaaggaagccagtctgaagaggctgtctatactgtatgattcaaattatatgacattctggaaagtgcaaaaaaaaaagagagatagtaaaaagatcagtgatagccaggggttcagggggaggagaagatacataagtaggtagagcacagagcattttggggcagcaacactattctgtatgatgtgatgatatatcctgctgtttagctgtaaacttgatcacatttctcctattgttataaacttcagtaaacgttgtttttattatctcttctgtgtggatttactatcatttatttaaattgcatcttatgtgcatttagatggtttataaatgcttgcgtaagtatcattgcagtaaaacatctttttacgtgatgtttttcttctataatttggaagttttttcagatatattagttctggggcattttgatggaggccttcagttttacaaaataagccagtgaaaacttacattccctttctttttgatttttgtaaaatatttctctatatttaacttgaaaagtattcatgatttttttgtgtgtgtgtgtgactgcgtctcactctgtcacccagcctggagtataatggcgcgatcttggctcactgcaacctccgcctcccaggttcaagcgattctcctgtcacagcctcccgagtagctgggattacaggcatgcgccgccacgcccggctaattttagtatttttagtagagatgggatttcactgtgttggccaggctggtcttcaactcctgacctcaagcaatctgctcaccttggcctcccaaagcactgggattacaggcgtgagccactgcacacggcctattcatgaatattttattttataaaatacatgtatatttttagcaaacttgggtattttattgtcctggcacttccattatatttctaaaagaaaacacttgtttcatatttttcttcaatagactggttttctctaattcagtaacaaagtgttgacacagggttccaattatatggttaccactgagatgttttcagattgtcaatgattatatgagtattttggtacaacaaaatgatatactatgattcatttgcttttaagttatgtttttgtgttttaaatttttatttgtatgttttatttaagattctggcagaattagaaaataattgtgctaattatttgaaatgtatttattttgaaagattttttaaaatcacgtcttttagtctttcatgtagtcagtgcagagcagcgtaatttaagtaatcagaccataaatgttgatagttttttatgatgggcaaagataggtggaaagaggtgacttctctggaaaaaacatctttgttcttgcgtctgaagtttgtaacatcacatacatcttcatagtacataaaactcaatatttaagaaatatattacattttcttactacggatgttgccatgcctatttttcctcccatacccggtaggcaggttagatgtagttctgatattgaatgataaaaataccatacaattttttgtgcatgggaatttaaatttatggaacctaacatgtatgttaaatggttaaagaaataagcaatctttctttcttctttttttttttttaacacagggtcttgctctgtcacccaggctggagtgcagtaatgtgatctcagttcactgcaacctccgcctctcgggcttaagcgatcctcccacctcagccttctgagtagctgagactacaggcatatgccactatacccagctaatttttgtatctgttgtagagactgggttttgccatgttgcccaggctggtctcgaactcctgagctcaagccatccacctgcctcggcctcccaaagttctgagattataggcctgagccaccacccctcagacaccggcctggcctttaagcaatcttagtaaacatgattgcaacacacaaaaagagtgagccaaacagaaaagagaatgaagagctctaatgaccttgggattcttggtataacttccagagatgtacagaagccaatcatacgatatgaatgtctgaattccccctgctggttctgtgtggagctagatgttgcttattggactggagatgtaattttactcttattttgcataaagcgaaaatgaattaaatctctttcaaaattaggcaaatattgtaaacagtacaattgccaaactggaaatgaatgttacatttaaattatgaaagaaggcagtgtgccaataggaaatattactttgttaagaatgtagttaggttcagctgctttggtctttatttagtaaaactgaatatgtatctactctttaacacactgtctccattcttagatgtactccataggaattcgcacgtgtgtaccaggaagcccatatagaaacattcctagcagcattctttgtaatggtctcaggcttgaagcaagtcagaagaccatcaacagtggcatggataaaaagtattatgttcaatgtacacagctgaaggacctacagctactcatataaacctggatgactcttacagcacaatgttgagtgaaaagcagcttgaaaaagaacacatatagtgtgaaagttcaataggcaaaactgtattttttgaaaactggcaaaactaaactatgtcatttagggttttatttacaggtggttctgtgtgtaaagaaaagggagggaatgattatcataaacttgtaaaataatatttgatagggaagaaactacctatccctagttggcctggctggtcttgaactcctgacctcaggtgatctgcatgccttggcctcccaaaatgctgggattacgggtgtgagccaccgcgcctggccacttgtgtttttttcatgtgatgtttacaatagcccttggaggtaagtggtgcaagacaaatgtcatctttattggtaattttatttataccagtggctttgttaccagaccccaccacttacccaaagttagccctgggtcaggggtttcctcatcattgtctcttctgtgggtcaccaaaaagatgttaccagaaaggggtcccgatccagatcccaagagagggttcttggattttgcacaagaaagaattctaggtgaatccatacagtaaagtgaaagcaagtttattaagaaagtaaatgaataaaagaatggcgactccgtagacagagcagtcctgagggctgccggttgcccatttttatggttatttcttgatgatatgctaaacaaggggtggattattcatgcctctttttagaccatatagggtgatgtcttgacaggttttggccaggttctttactgcagcccttttttttttttttttttttttttttttttttttgggaaaaaattttgcttttttgcccaaactggagttcaagggggcgaccttgggttactggaacccccccccccctgggtcaagggatttttttgcctcaacctcctgagtaactgggattacaggggggcccccccccccccaattaattttgtttttttaataaaaaagggggttcaccatgttggnnnnnnnnnnnnnnnnnnnncttttttttttttttttttttttgtgacagagtcttgctctgttgccgagactggagttcagtggtgcgaccttggctaactggaacctccgcccccctggttcaagtgattcttctgcctcaacctcctgagtaactgggattacaggtgtgcgccaccacgcccagttaattttgtatttttagtagagatggggtttcaccatgttggtcaggctggtcttgaactcctgatctcgtgatccgcctgcctcggcctcccaaagtgctgggattacaggcatgagccaccatgcccggcctactgcaacctgttttatcagcaaggtctttatgacctgtatcctgtgttgacctccggtctcatcctgtgactcagaatgccttaacctcctaggaatgcagtccagcaggtctcggacttatttaacctagctcctattcaagatggagttgctatggtttaaatgcttctgatagcttcaaggattaattacaagtgcatgtacataacgccttatctctggcacccacctctcttctaactttgtggcacatgtgattaggactctgttagtcttagaggtacctaaatctgtgcttctattctacctttgctgtctcagaaaacctaccttccatttagctctcaaagccaagagctaacccaactgatgcaggatttttcttcttagtcactctgcaagttggggacccctggtggtgatgccccgcctgggtcttgcttggccatgctgacatgcccccggtcacctgtgttatagcttgtacccatgttcagcggttcccaagttctcgtaccatgcccaagaagaatgaggatatgcaggacattgaagggtgcggagggcagagaagaattttattgagctatgaaaatggctttcagcagagaggggatgcataggggatgcttcctttacctgaaggtgggaaagttctccctgtgtggctgggtccagggtctcttatggactcagactggggagtgtgtgctgattggtttgtgagtatgcaaaaaaggttaaagtgaagacaccactcaaaggtggacacgacagtgtagaaaaccaattaggaaagggtcagtatatgtaaaataggtgaagggtggggaccagtcaggggaaagcacgccaaacaggaagacaagttctcaatccggtctgaggatttaacttgcagcttggctttcaggctttaaactctctttggcttagaggtgaagtttcactggggacctgcccctgtctgcctagacatttggctgcctcctgctgctctcacagcctctgttcttgatttcatcctttacgtcccccaatcccaatataccctcagttatacagtcacacacagtgcatcaacataagcaatagtgaagtttatcagctataccagtgtctgtagctttcctagagataaagatggccagtgtatgagaaaagaaaaaaagttaccaggaaaatataaatgtcttaagtttgtaggtacttctcaattttacctccagatcatctgtctgccccttcctctcataaccttaaacttcatcatctctcatgtgaattctttttttttttttaattattatactttaagttctagggtacatgtgcataacgtgaaggtttgttacatatgtatacatgtgccatgttggtgtgctgcacccgttaacccatcatttacattaggtatatctcctaatgctatacctcccccctccccccaccccacaacaggccctggtgtgtgatgttccccaccctgtgtccaagtgttctccttgttcagttcccacctatgagtgagaacatgtggtgtttggttttctgtccttgtgatggtttgttcagaatgatggtttccagcttcatcgatgtccctacaaaggacatgaactcatccttttttatggctgcatagtattccatagtgtatatgtgccacattttcttaattcagcctatcattgatggacatttaggttggttccaagtctttgctattgtgaataatgctgcaataaacatcttttatgtgaattcttacagacctaccttttgttacagttttttccacacttttcttttggagagaactttctaaaacagctaaaactttattgtgttggctctcttatttatactcttggtgtggatctcactgataataagattgtaaagccctcagtggcacacagtgaccatcgtaactggcagtttgcctgcctgttgatcctcagttccacttacatgatccttcccttctccagctgtgccttgtgcttctctgcctctgtggcttcggtcctgttgtccctctgcttagacctgtgctgtctctaaggaagcctctagccacatgtgacttttgagcattgaaatgcagctgcttgaatttatgtgttccaagtggaaaatacacaacaaattccaaagattcttaaaaaatgcaaaatacttaattcatcatttttatattgattgcattgaaatgctaatattttgcctatattggattaaataaaatatattaatgtaattatttttacccatttctttgtaattttttagttggctactagaaaatttaacattataaatgtggcccttattgtttcaattgaacaacatttggctagaatgctttaccttctttttggcttaccaagctcaactgtaatcctcttaagcatatatgttttttaatgtaaaggcaacattttctatagtgtattgaattaacaaggtactaatatagaggaacattttagcaacaaagtgaaatggcctggaaaatacagatatgagtatatactctgtatttggaaaatatagagaactgtaaagaaaacttaaaatatctaataattcttttggccacacataattatggttaatagtttgatatatcttctatgtatgtgtggcaaatatacatacatatacactctttcacatgtatatgcataactgaggtcatacttcaggtatgtaattttacacatgcgggggcatcttttgtgctcagaaagtaatactggcagttactcatgttttataccaagatttttatactttattaaagtaacattttcaagtttaccctttccttcagcttttaagttcagggtaacttaaattgaataaattttagcagtagctttcaaaaagacctttgattaatattcactgaactcaggttaaacagactgaatcccatgtaattaatgtcatttataaacttagctaattaaatccattaaaataataaaactgccattacaaatttgatacattagattttctttttaatcacttgacgtgtctacccaaagcacttcctattcttaaacaatcatagtatatccaatatagtgaatttctaattcttttaaatattttggtattatttacaagctttgagttttgtatgtcttggtgctgcacgcgtccatgctgttttaccttaacacagggatggctggctatacactgaaccattatgttgtccctgtgatagctaagaattctgggtccatgccgtctggatagggttgatttcgacccttctgtgcacccatgggttcaagttacattagcactttatccttcagggagatttatgttggccagtgtttcttaacctttttttccattattattcccctaaggatcctttttgggtcattttttcctaattgtcatttctcctgcaatggcaggaaattttaagaccacagatatactatgtattgattatgtactttatatatctatggtttatacattacaaagttagatttaaaaacatttgttttttttagagacaggatcttgctttgtcgcccaggctggagcacagtggtgcgatcatggctcactgcagcctcagcttcctgggctcaagctatcttcttgcttcagcctgctgagtagctggaactacaaacatacaccacaacacccaactgattatttatttatttatagagactgcatcttgctgtgttgcccaggctggtctcaaactcctggcctctagtcagcctcctgcctcagcctctcaaaatgctgggattatggacatgagccactgcatccagcctgagaagttagttaaaaaaacaaacaaacaaaaaacctttcaatcaaactttcaagtttgccacctttgagagaaaatccatagcgtaagcataaatctgcagccttctacttaggttgacccagttttctctaagtatgctttttactgctggattgcattttctgttcttttcatatctgtctgtcaggcttggagataactttcatagatatttaaattatactggatttgaatctgaatttttttatgctcttgtctagctctgcgataacaatactaacgtaatgctaatgacaatatagcttttaaaatcctatcttgtttatgtaccgttgtggtgtgttttctatgccattaatatttcttcatgaatgtaattttaatggtgtattatatggatctacccaagtttatttagccttcagcctatggttggtcattttggtggttttcagtattttgccattccagataacactttaatgaacatctttctacattacactgcagtagaacctcaggaagccttactacctgagcaggaagccattggacccatagttgcatctgccagagaccccacagtgagcaaaaagaaaaatggttcccctgttcttttccccttcccgtctcccgccagtgtctcccattgtcagaccctaacctgaagccagcaggcaaagtagttttgggaatatagcttgcaagtttgtagctccctgcagtacagatcatagatgggaggggtggaaatgaaagcaacagacatgaaatagctgataatgtggtctttattgtagagaaattatataattctcacgaaggtgcacaactagtagacggtaggactggactttaaaatcatgtgtggcttcaaagccgggatgttttcatgataccatctgtctctatcttttcttttgttgattcactgtggattgtctccattcttaaggttacccatggtccaggatggctaaaccagctccagccatcacatcttcattcaagtcagcaggacttgaatgtgtaagatatacatatatatatatatatatcacacacaagtgtgtatgaaatgtctgtttataaaattttaaaatgttgcataaagagcattcagagttctgaaaattaaaaagtaagtttagctataattctgtctctgtaaaaaaaatagctgtttttggtctttctcattctttttcagtttttgttcctagatatatgtatagattatatttcagcaaattaagtattatagtatttattgtttaaaatgttaagtaatgtcattttattttgtcattagagaatattaagggtacattatgaaagcaaaattgcatattgcagtatttttgaaaagctggagtctactagagaaaggtgcagtttgaatccaagctgtcacttttattaatttcagttcctgacttggtcacatcaagaaagcaggcaaattcttgctgtcaagcagctgaagtcattttcctccttcttttggttccatgattcatagcacatgttttgaggcaccttgttgcttttattcaaaggaaggatgttagggtacttctgccagttttcatgttgttaatgaagctcactggtttatctgggcacagttgtttgttctgatctaagttaaagaaaggacatgaaggacagggtatggaaggtaaactatcttttctgccatatcaagtgaaaaggagtattcttggggcactgcaaaggttttactcagatgaggtgtggcagtgactgctagttgtaccccttcctcattttagctgaccacatgcacaccaagaatagaccatatttctcattcttctttgtaaccaggtatggtccatattttagccaatggaatgtaagtagaaatagtatgggcaaatttgcaggtagaattcttaaagggagtacatatgctcatctttttcctgctgacttgaatgaagatgtgatggctggagctggtttagccatcctggaccatgggtaaccttaagaatggagacaatccacagtgaagcaacaaaagaaaaggatcctggcttttgaccatgatgaggcaatgtgcaagctctgctgcctttacttttggacttttgttgaagccattattatacagttctgttgtaactctccttaatcctgactcatactacgatataacatatagtagatgaaggcaagaccatgacataataaactagctttctagattgaattatttgcagaagtgattatcagaacttcataacaagcagaagagagtgggataagagagaaccatatattatacttctccctttctgcgtaccagtgattatcagaacttcataacaagcagatgagagtggggtgagagagaaccatgtattatacttctccctttctgggtaccagtttgtgtcctcagtctccagatattttcgtcatactcttcacaaaataaaacatttaaatccagagtagaagaaacaaaaacacagtgaattacacgaagaatcttctttgttaaatagaccttgaatcctgaaaatcatagtaattcacaggttgttgagaaagccattagagtgctctttaagcttagtctttagagtggaagaaaataaatgcataactcacttatgaatcgagaagttagaagcctgttaccacatgctcaggtttcatagtttatcttataaatatatgcacatttgaagttctactttggtaaatatatccatgtttattactgaaaaggtgtaatcacatgcctgttcaattacttaattaacttccttgaattccttttagaaaattaatgttccaggaaaatgtcattctgtggttttgcttattcctagtgcaccatgggctgtctccaagaattcacacatcccagttcaagaagcgggataatatgtgatttgtgcctaaaggagtttctgagccaactggatttttctgtctttcttttctgagtgatgtggtatattacaaaaaacataaaacctagacttaagcctgctagttttctgaccttagaaggggaaaaaataattaactctctacttctgggtaacctttgtgatctgaagttttaatttgttgtgttatgtctctgctattcacctttcttcttaaaatgacctgtcaggcttgttggaccttcttattctattcttcatgtatcttggtctcctagaatttccatttctcttccatctgcattttgggtaatttccttggatttatctttcagtccactaatcttcttttcagctgtatctgatctactatgaaatactttcagtgacattttctaatgtgtgagttataatgtgtgtgcaatgaagtacacatcttaattgtacaacttgttgcagatctaagtaagtgattaagtaaggtgaggacttagaatggactgttggtaaatgaatggagctggtacaatggagcttggtggttactttgtcatgaatcatttatttggaatggtgtttaggaagctaattaggatgggtttaagggagaaaggaagtcagagtataggcagaaaaataaggcaacaaatggaagggtgcatggattctagggaggttttttatttttgtttttgatcggaaatttttacatatttgtacactgtgataggaataattcagcttatttccacaaatatttattaaatgcctacatttcattgagcttacattttattcaaaacagagagattgatattcctaaatataggaggaagtatatttcatctgaaggcagaatgtacatgttgatacaggtgaatgtgtagattttaaggtggaaagacaaggtagttctcttctgatagattctgtctttcagttacaaagaggtaagagtcagctaagcatgaagattagggattgttgttagaagtttaaagagaacaataggtttccccagggactaggtcaatgtagtaggattgctgggcagagctgggggtgcacttgagatttgtggtgatgaacttaaagtaagagcaagtggaatggttatattgttcttcagctatatgtaactgccctgggacatggagtaggtggagagttggatttaatcaagattagggttttgccaggcaaatatggaggaaaagagaagtgagggaattgggaaggcatcagcaagaaagtgatttcagtactgaacttcagaatcctagttgggtgaggagggaagtgaggacatggagatggcgatggacaatgagaaaagtagtagagataacagagcgggtcaaaaactatttgagtcaggactagaggaagtgacctgaatgctgggaagtggtagtcagggagtggaatgcatgaattcagaattgtagtggcagtgcagtcaccagtggagagaatgtctaggcaggatgagactaaggggctgggtagctgaggtagaatagaggaagtgcaagcagatcaaggacttagaggctgtgttgttgggtgccttgtctgcagggacgtagaaatttacaaaatgagcacgggagtagtgtggagggaaagacagtgagctaggtgctcagattatcagaaaatgagcaggagtgatggtgatgtctgcagatgactcgagcaagaaacgttgatggatggagtagtctgatgggctatttcaaggtagctgggatgtttgaggagaaatgacttggaagcagtaatgaagagtcatctccatggtacgtggcttgtggagagagaactaagaggtcaccatttgaaaagccttctgagaaagagctgtcctcaggggacacccaggtttctgttagatcaagggtattcaaggaggctgaggttgacaatatagaaggttttttcctaatgaaaatgtgtgctccagaaggctcagtggaagggctgggatgaagagagctgtgggcaatgaacagggatataaagcataatatgataatgttggtgttttaggggaaggtaggtaatgagttctgattctagccgttgacaatttgttgggttaaggctgttggcctcctggccagggaagtgggtgtcctacttgaagggttgagagctgtgggagcctcttttatatcctgctggttccttatatcctggcaggggaaggatgttggcagactatggtcttaacagtccatgcatctctgtattgtgtagggttaaccagggaacctaaaaccatctttgaccattttgaagttaatagaaacttataattgaaaaagctagcgtgcatcagttgaagactatgaccaatataaagccaaatgcatcagtaacagaacatctttcttccaaactgcaggaattccagacacctgtggtgtgtctgtgtgtgcatgtatgtgcatgaggagctctgcagcacaaacaagcactgcatgcatagcagccagactgttttgtaggagacttagttaggatgtcctgtaaatgctagtaattttccccccatgtatatgaaaaccaaatgcaatatcccataattcatttagtaaattaatattaagttggtattaatcatagtagtaaaaatgaaaatgaaagatacatactttatgccattcatttgtatgaatataggaaagcacttgaacttttggcctgtctgtggtccttcagaattgggcagtggaacatcctgtgggaagcactgtcatgtgggtacctcagagcctgccctctcttttcagccttacctcactgcacagctccagccaaagggccacgtgcaccaaagggtcacacctgaccagcttttaatcattccatacactgaaatgccttcctcctctccacttgcagatctgtctctctccagcacactccaggtcataggcagccttcttttgaaagctctcctggagttccctagcagacttcatcatctgtgttcccacaggactttgtaaacctctcattatacagtattagaatgacattcctgctcgttttcttctttaaaatcatgggcaccttaaatgtagtgacaacaatttattctttgaggaatttgagcaggcctgcaaagagacagtttagtgaatgcttgttgaaggaatgaaccataaagaaaggggcaaaatgcctaagagagattgtccctcaggagaaatcaggaaatgcagatgtgataccaagatgaacagatggcagaagaggcaacaaatcaaaacaagcaaacacaaaaaccacagaattgcatctttttggactagcaactgtttccttttggatatggggttctgtggatgaggatgaaggagtgggagagaagtctgggaagataatttggagctagactcactgaaaaccacaaaatgctattctctagaacaaatagattgaatttaggcctgttaaatcccaggtgctgaagttctgttctatggcagattctaaacttgtattattttcagccaggatgaggggctccctttatggttttggagtaggagaggcatggcctggtggttgagagcatcagttttagagttggaacagcatggatgcaaatctgcgtagcattctgttatgtgagtaagggacttaactcctttgagctttaattctttatgggtaaaattgggtgaataaaaatgctagtgagatttcaatgtagtaatttgtgtggatcatcattaaatagcagaagctactgttttccttcccccttacttctcttctttcactcgtccccccacctccgccttcaacagttccttgagtatgatggactttaaactttatggatcacatatctcatcaatataaccttttaaagcagcacccctgatttaggttaattgatttagaaattatataatgcatagttatattaattatgacatctacagattgacatttttccaaggataaaattaagtaaaatttttaaagcattttaaaattgtgttttcacagtaagaaaatcttttatattggaaaaatattaataatcatctgaataagttttataaaatgctttgctaatcatgatggcttaatggtatcattgtttaatgttgcaaggaacagtatctatttagagccatgttcattgttaataatggtggatgtaaatctgtatttcagagagtcttggtaatggatagaagagcagttttcttcagagatctgattaatattgtctttgttcttagctcacaaaaaatggctaacagagctttttttgtatcattgtcattggcttgtactcggatcattaatgatttcatctggaatttctttgcacgcaagttttaaaatagttttatgattccattatttttaaatggaattttatgagaatcagtttagttaaacctaagtggtaggattatgcacactgaaccaccatgtgtcttattttgtgagagagaaggaaggagagggtgcctgtcactcctgttgcatggcagggctgcactcttctctcagaatacctagggcaccacacatgactgtgacttcctgacagatagaccaagtgcaggtgccactatcaggctggattatgcatactgctgaagcttagctgctgcatatttctgagatgaaaaacaaagctctaatattttctttcctcaccagctttggagactactagtgttagtgtatgcttattaactgcttgttgaaatgaattgaatgctttggggatagtttttcaatttcataaatactttcagatcattcctatcactcctatttgcatatttcacatttactacatgtaactttcttttctggattacttatgtcttgggaaccttttttttttttttttttctgagacggagtctcactctgtcacccaggctggagcgcagtggtgcaatctcagcttgctgctagctccgcctcccgggttcatgccattctcctgtctcagcctcccgagtagctgggactgtaggcgcccaccaccatccctggctaatttttttgtatttttagtagagacggggtttcaccatgttggccaggatggtctcgatctcctgagctcgtgatctgccagcctcggcctcccaaaatgctgggattacaggcgtgagccaccacgcccggcccaggaaccttcttaattctttttaaggagtaaaggcatacacatttatttaacatgcatacatggaaacccccataataaagaccccatattagaatgaagaccccttgatttattaatttgaaatcttctttttcaaatacttacatgtgtccctttctttcaaagattttagttttccagtgcttccagaactcccatcttattcctctccttaggttgatgactttactattgctaactttaaggtttgaggcaccgtgctccataactcaggctttcttcttggtattatcaataaaatcaaaataagagtttggggaagaaactctttctatctttccttgaatattactttcaactagggagtagtagttactcaaggattcctttacttttggcccatgatgatattgcacagaaccaatccttaattcccagaaaaactaacagccagagacctatatggaaaacatgactcaccacaggtaggaatatatctatacaatgtactttattacatctgctgtaattcggtttatatttactgcttcacaagtagaactcaagttcacttgagtttttgcaatataagcagttagcctaagattttactatgtagaaacctttttttttttggagactgagtcttgctctattgtccaggcttgagtgcagtggcacgaacatcaacttactctaatttccgcttcccaggttcaagcagttctcctgtgtcagcctctcaagtagctgggactacaggcatgcgccaccatgcctggctaatttttagtgttttagtagagatgaggtttcactatgttgcccaggctggtctcaaactcctgagctcagggaaccggcccacctcagcctcccagagtgctaggattacaggagtgagccatggcacccggcctactatgtaaaaacttttatttgtagtttccaaattgattctttttggttactatattgttaacgttaagtttattatttatgtttttgagtatgtcaaaatatatattattgttgattgtttctgataaaatctcatacataattcaggcttcaatcttgatttttatatggagaaagaatttcatacaaatatgtatatatttatgtatttatatatttatatatatatttatatatatatatatttatatatatagctttttttttttttctcgagacggagtctcactctatcaccaggctggagtgcagtggcacgatctcggctcactgcaagctccatctcccgggtttatgccattctcctgcttcagcctcccgagtagctgggactacaggtgcctgccaccacgcccagctaattttttgtattttcagtagagacggggtttcaccgtgttagccaggatggtgttgatctcctgacctcatgacctgccctcctcagcctcccaaagtgctgggattacaggcgtgagccaccgtgtccggaccatatgaatatttttatataaaatgtaaaaaatcatctgtaaaaatgcaaaatttaaataattctcattgttttcctatttaatgtaatacaaaagattgtgctagatcctaggagtacaaaggaatcaaaccatggtgaaggagggaaggccctctctcagggaacccacagtttagcaggaaagatgggtatgcatgtcagggttgtttagtagtggagggtggacagggtgttgcaaggttaaagtctgtatatcgtaaaggaactgttttaggaacagggcttgttttgtttgaagaaggagtctctggtggtggtatacactatcagatgcttaaagacttgtctgttttcctaaagggtaatatttccaaaactttagccacatccatgccactgccacgattttgtcttatatgagtacaacttgaattccagtttacttagttcactttagaatgacttactttttcaaaattgtaagcttattatttactttattcttgtactatgtgggaaagtccttgatcttctgagattgatgtgctagttatatatgtctaatatacataactattaaagatttttttaaaaagttttcctctgcttacaccatcatcattgatccgtgtaccattttgggaaacactgctttaggggatgacattgggacatatggaatgaagtttctgggaaccggactcagacttgtttaaaggaagggttgtctgcccctctgagctcacagcaccctttcctgtttcatggatcatagttaatttgtttattctttttgcatatgtgggtgagataggatttatctctgagggcacaaggcttttacatttattttgtttccttttatgcttcacattttaaaatactacctgcgtcatctaagtttctcataaatgtttattgtagggatatgtgaaccaagagttttactgagacagttgaattctagtacctttcatggttgttcattttagaaaacaagtaaacaggaatcgatcttcataattactgaaatatttcagtggatttttttcaactttttggaaacagttctattttctattcttcaaggaattaaacttaaaaaaaacttccatatgacatatattatgccagattataagtcagagagattctgacagaatttttttttttttttttgagacggagtttcgctcttgtcacccaggctggagtgcaatggtgcaatctcagcttactgcaacctttgcctcccaggttcaagcaattctcctgtctcagcctcctgagtagctgggattacaggtgcccgccaccaggcctggctaatttttgtattttttagtagagacggggtttcaccatgttggccaggctggtcctgaactcctgacctcaggtaatccacctgccttggcctcccaaggtactgggattacaagtatgagccaccgcacccagccacttctgacaaatttgaaactacaaaggtggataaaaagttttactgtgctatgagttttaaaaaacatttttctttgttcgcccatgtgttttttttctttcttgagatggtcaaagcattccttttgggagacaggatgggttagtaaaatcgtgttttgtgttaggaaaattgaatttgactcaaatctgttttaggaactagcagtcaccagatatttcaagagtgctttaagtgtaaatacatgtaaaaaggtgaaactattagtgacccttttttcccctttcctagcattataacatgattggctgtcattcaaggttgtgtatgttactgttttacatgcatttttaggctggcaaaaataggtgttggagactgtgttttcttaatatatatgttgattaaatagaaaaagtgatacttgaggattatgccctttaataaagatgcaacatcaagtatgcttttttttttctgattacaccaacactgtttgttttaggaaacattgttgttctaaggctattctattaatttttttctaattaaattttattgtttcttttgttgtgtgttcattttagaaatcaaagtattttgatgaggaaaaaaaatcacccaacataaaaacataagcacttgaagcatgatatatacccattatcattattatcataatcattttacaaaaagggatacatacagtgtttttctttttcttaatggtaaactttttatttaagtgtaacatatagaaaagtgcataattagcatgtggctcaagtaattattataaagtgaatgtgttcagtcaggtgaaagaattccagcactccagaaccctctctccaatactctcatcttcactctgccttcccaaccactgaggatatcactatcccaacttctaatacgctaggttagtcttgcatggttttgaactttatattgatgtattcttttgtgttttacttcgtttatttgtgaaattcatccacatttctgcatgaagcatagtttgttcatttttatgacaactaatttcattctattaaataatttaagtacagtatatatttatacttcatcctaccactagtgtctgaaagtacccatctcctagtgccctcatcagtgttaaagtattacaacttaaaatataggattaaagccaattgacacctatatttagaactttgaagataacatccttttcctttaaatagcaaatataaaattcttattacttgtacactttaaaaacatccttcagtaagtactttgtgaaggaataaattaagtttataagttggagccctccaagatttatagaatgtgaaaaagagacagctctttctcttcaaggagtctacaggaagacttgtgtatatataatacacataagtataatccaagtcagacagtggtgcagatgatcataggagatatagccagtgtgctatgagagaagagaggaaagaatagttattttttgctttgtattagaacaaatgactgtgacttggaccttgaagaattttctaagcaaggaaaaaagagagaaatgagagaaaattttaaaaaggtaggaaatagaatggcattcttggttgaatctaaacatttagtaaaaagtccatcaaccaatggtcagttctagtcattgatagatctctgaactatttccccccaccaatagtcatgacatttaggtaacttttcttattccccccgacaaactgactgcagtttatttatctgtctctgtttcatgttagtttctcctttagactgaagctgcgtgggtagggcattagtgtctttttggtacatcatgtctaatccagttttttgtactttgctcaatccatagcaggcccttaataaatgatgaaatgaatgtatacaagtacataggcagcaaatacacatttgggcacagcaagcttcctctgtggtaaagtatagattggtcaggacccttgaaagaaatcaactttgaagaaattaactgatcatcagacaaatatttttttccatatgaatgcttctagctagaaatagtatggttttgggtggctcgtgcctgtaatcctagcacgttgggaggctgaggtgggcagatcacctgaggccaggagtttgagaccatcctggccaccatggcaaaaccctgtctctactaaaaatacaaaaattagctgggtgtggtggcacctgccacccactactaatcccagctactcagaaggctgaggcaggagaattgcttgaatccaggaggtggaagttgcagttagcgagatcacgccactgcactccagcctgggaaacagagtgaaactctgtctcaaaataaataaataaataaataaataagaacggttttggttttaaaagatactaccattagaggaagctgggtaaagtgcacatggaatacctgtgtatttttttttttagcaaagcatgtaaatctacaattatcttgaaataacaagcttaaaaaattgtgatgagccaagaatttttttaaaaagcaataatattctggaattttataatacatacctgcattagttaggatatcggtttggcttttagtagagaccagacaccagtagtttaaacaagagagaaggcttatatttctctcacatggaagtctaaactagtctagaggcaggcttgctttctgaggttatccagggaccaaagttcctccaatcttgttttaccattcctcctgcagtgtcctcatacatggtttggctcccaacactatgcctgggttctagccaatggcaaggataaggatgtgaggagaaaatagcttccttttaaggatatgacctgaaagttgcatgtgctgctcccgttcatagcccatttgttggaatttagtcatgcagacatattttgttgcttcaagaaagactgggaaatgtagtcctacccagctaaatctaaagttttaaaattttatttttatcaaaaagaagaaagggagcatggtgtggaggtcaagtagctctgccacagtgtttgtcctgaaatgcatgttcaataacttttttggtgaaactttctttccttattattttactatacttatgtaggaaaagcatgggtgttttaagatttagatgtatttgttgggtcatgatggaagtaaaaatcagtttatatgcagtcgttttaatgcttgtatcctcattactttccccaaaggaagagtgtttcttctttgtatttttggttcctagcatgggacctgaccctaacaggaactcattacgtgtctattgaccgttagccttttatagatgttgactgaacatctctagcagaatttttatacatctctgctatctgacctgccttctccttaattctttcatggtatatggtttgtatcagtattacagttttaaaatatatgatatgccccttttaggagatttttgtaactgtggctgacagtgcatagtatctttttttttggtatagttctgattgaatagtgttttgtaatatgtttgttagatgtaagaaatcatttatagtttagcaagtagcatgtttaatatgaaaaagcagtaacttacctctatttcattcaatcttgataaatttatcaagcatttgagttcattttttaaaaatgaggtttattttttccttgattattatttttattgatgtttcatactttatgtcctcttcacattttgaatgttaaggataagtagtcttcagtcagtacttctttaaaaaacttgaattgtcaaccactgatcaaggaaataagagaagacatgaacaaatggaaaaacattccatgctcatggatagaaagaatcaatattgtgaaaatggctgtactgcccaaagtaatttatagtttcaatgccatccccatcaagctaccattgactttcttcacagaattagaaaaaactgctttaaatttcatatggaaccaaaaaagagcctgtatagccaagacaatcctgagcaaaaagaacaaagctggaggcatcatgctacctgacttcaaactatactataagactacagtaaccaaaacagcatggtactggtaccaaaacagatacatggaccaatggaacagaacagaggcctcagaaataacaccacacatttacagccatctgatctttgacaaacctgacacaaacaagcaacagggaaaggattccctatttaatcagtggtgttgggaaaactggctaaccatgtgcagaaaactgaaactggaccccttccttacaccttatacaaaaattaactcaagatggattaaagagctaaatgtaagacctaaaatcataaaaaccctagaagaaaacctaggcaataccattcaggacataggcatgggcaaagattccatgactaaaacatcaaaagcaatgacaacaaaagccaaaattgacaaatgggatctaattacactaaagagcttctgcacagcaaaagaaactatcatcaaagtgaacaggcaacctacagaatgggagaaaatttttgcaatctatccactgacagaaggctaatatccagaatctacaagaacttaaatttacaagaaaaaaagcaaacaaccccatcaaaaagtgggaggatatgaacagacacttctcaaaagaagatatttatgcagccaacaaacatatgaaagctcatcatcactggtcattagagaaatgcaaatcaaaaccacaatgagataccatctcatgccacttagaatggtgatcattaaaaagtcaggaaacaacagatgctggagaggatgtggagaaataggaatgcttttatactgttggtgggagtgtaaattagttcagccattgtggaagacagtgtggtgattcctcaaggatctagaaccagaaataccatttgacgcagcaatcccattactgggtatacacacccaaaggattataaattattctactataaagacacatgcacacatatgtttactgcagcactattcacatagaaaagacttggaaccaacccaaatgcccatcagtgatagactggataaacaaattgtggcacatatataccatggaatactatgcagccataaaaaagatgaattcatgtcctttgcagggacatggatgaagctggaaaccatcattctcagcaaattaacacaggaacagaaaaccaaacacttcatgatctcactaataagtgggagctgagcaatgagaacacatggacacagggcagggaacatcacacattagggcctgtcggtgggtaaggggctagaggaggggatagcattaggagaaatacctaatgtagatggcaggttgatgggtgcagcaaaccaccatggcacgtgtatacctatgtaacaaacctgtaccttctgtacatgtatcccataacttaaagtataataataataagacaaaaaacttgtcaacaccagatttgttcttttagttaattttagtttttagtttttagttagatggattttaggagttagtttggaagacccaagggatacaattaagaaactttgggaaccatcctgaatttggtttttggaacacaaggaaatattttgtaactttccttatttttctggtggacaggtttttgtgtgtgttttttttttttttttttttttttttttccaacaggaaaatgcaattccactaagattcttaggtcatagatcagaggcttggaccagcaaagagaaaggaacttttggaagaatctttgtccagtattatgggccagtttaaactgtaatgtaggcagtgacaggctgcttcatctctccctgcagtactgtttaccagaaaaaggaaggagggctctgtgtgtgtgtgtgtgtgtgtgtgtgtgtgtgtgtgtgtgtgtgtgtgtgtctgtctgtctgtctgtctgcctgcctgcctgcctgcctgtctgtctgtctgtctgtgttggtggattcagggaaagatggagaagcttcccaataaaatgttagtttatctgacattagaagcagcttctcagccctcttggaaaatcttgaagaaaggagagtgaatctgtgttgaaagggaatcagaattttgtttgtgcaatttattcagtagtagtcaactcatttctactagcaataaagatgagcaactgtgaagaggatccaaaaaacacttctatttgaccttggggaccatgttgtgattatttttgttgcagattgaactttgtaattgtgtttctcattgctctgaatcctggaacacacagtgatggatattggagctgactgtcatggagcatactctgagtggaagaaaatggctttaaatgttttaaaatgatacaaataaacaacacaaatcaatcccaaagcaaataattaatacttggctactggctgtaccttcttaataattttgattttcttattaaatgtctcaagttcttcaactatgtcatgaggattgttttgaataaacttaaatttgtggtctataattaccaattattgacaattttaattcagattttccttatgaaatggagggagcacattatttaacagaaactttcctgtgttccccagtcatcttaaaatccttcctgtattaaaaaacaaaacaaaaaaacctcttcttgctgatcctcgagtttgcttatacctatactgaaaatttataccagatttgcagtttgaggttcccagtatactcttttttgaggacctcgaaatttagggatggggactatttccccccttcccccataacagctccttaaaagttagtagtaaaaccatttcagtaatcatttaaaaagcttgatatttgtaggctcacaattgtgtaggaaattacatatttaggctattcataagatactttattttgtgtgttcagtaaaaagtacaaaatattataaatgaacagatgttcacactgaactgtttacaatgtaaagtagaaataaaaagtatctgcctgtgttagttcggcagaaacaaaacgtttcagttgcttgttttgttatacattgcttataatttatttacagaagcacttaattcatttaataagtgtttttgtaaaaaggacacctgcccattataataagtaataaaaaatatgtatatgcaaagattaaagttaaatatcacatctattgccatggtcctcgatataatcagagctaacatgttgatgatttttccctccaaaattatcaggaggttttctgttttgttgttaaagtaaaaattacagggctttgtcctagttccaaagtatttgcatcacatttttgggggagttggtgaccaggaattttcctccttcccttccttattatttttaattgcttattatgcttgaatacgtctctgttgtagaagagtcaagcaatagagtaatactacactgaacaaagtctgagactctcctgaagccaccttcactcccactctgctccatgacgaatgaccactgtctacagtggaccctgccagggacctgtagatggacttacatgcatagatatgtgtatttgcaagttcttaaaacaaatggagcatgcatatatatacatatatatctatatatatgtagtttgtgaatggcctttttcacttagtgatttctgatgagattttcccatattctacatactaatgggatctatatttttctgttattttaattttattcttttacatttatttttaaagaaataaatatattattactggggaaaaattaaactatacaagtaaaacaaaagtcttccttgaattccttgaattccatgcaatcccacttcatcctctagagataatctctgtttgcagtgtgatgtatactttgtccttcttgttttttttttaaatatgtacatatggatacatatatggtttggtaagtgattttttaaattgttacatcagtttttctgcaacttgtttttttcacttaacggtatttccttgttggtacatagacatctacatccttatattgtattccatggtatagtttaaccatagcttatgtcaccattgttactggtgagcatttatatgttgtttacattattggaccattataaacaatattacagtaaacattcctatacatgctcttttgtgtgcctattcaagtattccttggtatagaaaaaaaaaaagaattgctgggctcatgagtatgtgcattttattttcaatgaaaactgccaaatgtactttaaaaagtcctgtaacacttggatctcttactactgataatttcctatacctttactgatactactgagtcttatcagtgttatcagtcttttaaaaatgttctagtctcatgggtcatctcatcatcattacatttttaaaaattattgtttagacttccgttgtccgtttaaaatatataaataaatatatatgtgtatatatatatatttgagataggggcttattctgttgcctgggttggagtgcagtggcacagtcacagcttactgtagcctcaacctcctgggctcaagtgatcctcctgcttcagcctcatgagtagctgggactacaagcatgaaccaccatgcccggctatttcttttttaattattattatttgtagagacaaggtctcactgtgttgcccaggctggtcttcaacttctgggctgaagcagtcctcctgcctcagcctcctttattgcccattttaattttggattacttttttttttttttttttttttttttactgatttgtagatttttaaaaaaatccttttgttatacatgttacgaatgttgcttcttcatatgttacttgtctttgtgatgtgttttatcatgtaaaagtatttaatttttaaatggtcaaatgaatattcttcatgtattcttgaatgttgtttcttacataagaaaagggcttccctgactcaaggtttatacatatgcttctataattaaatactaacaaaatttcactgtcccaagaacacttaacagaattttatccttttcttactgatctggcacactacctttatcataatcttaattatcaaatacatgtagctctgtgctgacctaatttctcttctgttgacctatttgtctcctctgctgccaaatcacacttttacatgactatagctttatacaaattgtactatgtgaatggttgtatacttccctaggtcggtctcagaattgttttcttatgtatttttttcatgtagaaatgttttatttacactgtattacaaaatatcacataaagtcttgttggtattttgatggttattatactgaattttagatttacttagagacatttgacttttttttgtttttgttttgttttttgtttttttttgagacagagtcttactctgtcgcccaggctggagtgcagtggcatgatctcggctcactgcaacctctgcctctcgggttcaagagattctcccgcctcagcctcccaagtagctgggagtatcaggcatgtaccaccacacctggctaatttttgtatttttagtagagacggggtttcaccatgttgtccaggctggtctcgaactcctgacctcagttgatccatctgccttagcctcccaaagtgctgggattacaggcatgagcccctatacccagcctagatttgacattttatagtattgactctttttgtccagaaacatgttatgcctttacattaattcagatctcatatggtcttcaaattctatggttgtcagcctaaagatcatctctattttaggtttattcctgaatattttattggatttgttgctattttgattggaattaaatatattttctaattatttattgattgtatgtaaagcttttaatttttattgttgttggtggtgttgaccatatagccatagtactgcaccaaaatcttctattagttatagtgtgtcagtaatggagtatcaggtggctctctttgatattctagaacaattaactctgtccaatagaaatataatagaagccatgtatgtaattttaaattttctagtggtcatgttcaaaaagtaaaaagaaacaggtgaaagtaattttaatactagtgtatctaaaatattatttcaacatgtatttagcataaaatattagtgagataatttacattctttttttggtattaagtcttcaaattttcatgtgtattttacacttatagcacagtgtaatttgagctacagtagactcactttaaatgctcagtaaccacaagtggctagtggccactgtactggacagtgcattttttttttttttttttttttgagacggagtttcgctcttgttgtggcgcgatctcagctcaccgcaacctctgcttcctgggttcaagcaattctcctgcctcagcctcccgagtagctgggattacaggtgcccgccaccacgcctggctaatttttttgtatttttagtagagacagggtttctccatgttggtcaggcctcccaaagtgttgggattacaggcgtgagccaccgtgccaggcctggacagcgcatttctaagtggaccagaatattgcttgcaaataatgaaattttttctctaaaatttttttggtctttttttcttttgtcttaatgtttttgcttgggcattagtagtaccatgctgatgttgatgatattaatgggaatacttacaatgtttgaccactatgaatttttggctagaggtttccttccctttctagtttgtaagaatttttctttaaatcagaaactaattttaagtttaaaatatatatatatttaaatatatatatgaaaatgtggaaactctcgagatgaccatattttttattttaaaaaatagaaataatacttttaaaatggtgaacaattcttgtactttagaaacaaagcctcttgatcataatgcatttattattattattattttttgagatgagtctcactctgttgcccagcctggagtggagtggcatgatctcagctcactgcaacctctgcttcccaggttcaagctattcttttgcctcagccaagtagctgggactacaggcgcctgccatcacacctggctattttttatatttttagtagagatggggtttcaccatgttggttaggctggtctcgaagtcctgacctcttggtccacctgccttggcctctcaaagtgctgggattacaggtgtgtgccactgcacccggcttgcattaattttttttagcaaatttttctactaaatttcattcacttttttacaaaatttaggttacctaatcataaaaatctctatttctctattttgttgtaaatacagtcaatctttgtccagtttttatagcaaggattttctggccttgtgaaatgtatagacatgattcttgttctacactttggaactgctcattaccatattgtattatattacacagaatactttacagaaatacattcatctcattggtggcagcacatcctaacagggtgttttcctccccagcaggactctggactgtcttcacactaggtggtgtgggcagcaaagcggctgcctctccagagctttcttcccctctggccaaccagagtctcctgcttctgctggtgttggccaatctgacagatgcctcagatgcgccaaacccctacagacaagccattatgtccttcaagaacacacaaggtttgtggtattttttctctaatattctttgtaatggggagagtattgcttgttctatattgtttattgtcttatagttttggagatgagtgtccattgtatgttttcatattggtcaaacatgagaaaaactttagcttttcctgtcaatattatcaggaaggtcaagcatcctttatatctgatcctttatatctgtttaaatccatatttctttcatggacaaccaaccagcatgtgtttaatttgggtcagtctgtactacctgttagggataggaattaacctggaaaacccaaatgctaggttgttttaaattttcagttaaagtctgtgttctagagttttatagaactaaaaattaggtctcaaaaacaaaaaaaaaagattagaacacaaatcagaaaacctttttctgtagagggtagtggctttgtggagtcacatggtctctcctgcagtctgttagccttgccgtttttccatcaaagcagccataggtactatgtaaacaagttagatggctgtgctccagtaaatctttacttccagacaaggggcaggctgcccatgagctgtgtaacttggtattaataactcctaaagtagaaggtgagcatatggcttcatgttgaaccagtattatctcttctcaaaaggttacattctaaaagcaagattcctgtagtatagtcaagtgctgctcaacagcagggctgtgttccattaggcaattttgtcgctgtgtgaatatcatagtgtacttagacaaacctagatggcgtagctactacacaactaggctatgtggtgtagcctattgctcctagccaacagacctattcaacatgatgatgtactgaatgctgtagtcagttgtaacacagtggtaagtatttgtgtatctaagcagtctaaacctagaaaaggtacaataaaaacgtggtattataatcacatggaatcactttgaatatgtggtttatcactgactgaaacgttattatgcagtgcatgaccagatgctcaagacattttgaacactaatgtaatgaagatgggtgggaagtacagtgattggatgggagcatttgtaagccttctgatgggctgtgccatgattcttccgggttattctgatacacatttcttatagacgtggctaaatgtgcccattaattgcgcctctgccaattctggtattatttgcagtgtgtctttgtccatttgtgctgctctaacaaaatacctgagactcaataacttataaagaacagaaatctatttctcacagttctgaaggctgggaagtcaatctaagatgcaggcaccggcaggtttggtgtctggtgagggctcagtctctgcttccaagatggatccttctagctgtgtcttcacatggcagaagggagtcaagggctaaaagggctgaatgctatgtgggccctcttttatgaaggccttcatcctattgatgagagatgggcccttaggacctaatcacactgtaaaggccctacctctcaactttatttcattggagattaaatttcaacatgaattttggagaggatacaggcaaactataacacaggacaatagggaattaataacaattttacaaattaaaaaacgaaaactggtgtatctgttagtatttttctgttcccattacttactcttcttggtgacagtatggcttaatggttaagaaagcaagtttcagagtcaagcatacctggcttcacaccatacctctatcgcttcagagtgtgagacctttgacagtttgcttaatctcaattagcttcaaaagcttggcctataaaatagagataatatcacctaatagtatttgtataaagaccaagcaaggtaagtctttaaaatgattagcccagattttgcaacaaagcaggtattcagtatatggtatctactatgttactcttgttgctcaggccaaatgttggtatttagggctgaactttgcttgggatggtcatggtttgggagaccatgtagtacaatgaagcaaaatgttggcttaagggtattcatatccatcagggctgatcttggcaaagttacttaatccctttaaacatttattacattccatgtaaagctgatcagaataatgacatgtttgatgtatgggttaaataagggataacacaaacaaagtgtttagtataacagctggttcatagcatttattagctagtaatgtatatatgttgtggatacatatacacaacccacatattccctttgcagtcaggtataatacaggttggtgaatttgttactttccttcaattttaaagaagtgtagtgtgtctagaatcttcctccagtgaacattctgtagattccataatatctgcatactcacagcacatggcaacacttccttttgccatcccttgcaaaaatataaagccaaccacaaaaaaaaggaattatttttgtaagtgtcaaaaatacagtgttagtattgaaaaaatagtctatatttcaaatgtggaaggaaaagtgagggcactggatagtaaacctgaaggcattttggtgcattcccctcacaaatgtaaagcttaggaaggagaatctgagaggcaaggattgtgttggaacacatctctttttccataagagcacagcttttagaaatgttaaagcaagttgttttgttttggtagtgcttctgtgttttaaaggcttaaaaataatttggtgctttttagaacgtaaaaatattagctctttgtgctaccatgttcagagttttatttgattggatgatgactttctctgagtccattgaacttatctttatcttctttgttgcttcctaaccttggttgcttcagtttctcagcaaatccagttaactgttggaaaggggctgtgtcagattggaatatcaagaacttttcctaatacaggctgtgatttgttcttttcattgttccagtgactgtactttaaaaaaaaaaaaagtttcttaacagttatagtcaattaggtttgcattggagattatattttattttattttaaaaaaagttatagaagttttctggtagttgtctcaagcttggtgtgctcttttgattatagaacctaatgttgaatatacacagatggcccccaacctgcaatggctggacttaggattttttgactttatgatgtgcaaaaacaatataaattcagtactgtatttgataaattacatgagatattcaacactttgttgtaaaataggcctactgttacagttggattgatacaatttagaactgtacacaaatataatagcttaggctaggctagactacactatgttgtttggtaagttaggtgtattaaatgcattttcaacttagaatattttcaacttatgattaatttatgggaatatgactccattgttaagttgaggaacgtctatactgattttgatataagtggatgcttcagccacaatttatttaaaggcagtttttttctttttaattctatcttaaaagagaattttctattttgtgtagaaattatatctttttctgtagatattttttatttaggactcatggttatttagttttggtaacaaagtattttatctcaacgtcctggttaagttgtattgattggtgggccttttgcctagctcataattctgtttatttaagttcatgttcttatagctgatttatttcagctatgttaatgggaaaatagtaacaaagtcaaagtatatgactttgtttagttctttttaaagtaaaatttttgttttgttttgttttagacagagtctcactctcgcccaggctgaagtgcagtggcgtgagctcggctcactgcaacctccacctcccaggttcaagcgattctcctgctatagcctcctgagtagctgggattacaggcccacgccaccatgcctggctaatttctgtatttttagtagagatggggtttcaccatgttggtcagcctggtctcaaacttctgacctcatgatccacctgtctcggcctcccaaagtgctgggattacaggcgtgagccgccatgcctggccctaaagtaaattttacataaattaaaattttgaatctgaaatgtagtgactttccataaaattaatgggaattgagttgtacacattactttaacaatatttttatttatataaagcacagctagaaattactgatgtgctgttttctgtattccagatagcagtcctttcccctcatcaattccacatgccttccagatcaactttaatagtttgtacacagctctttgtgaacagcagacatctgatcaagcaactctcctcttgtataccttgctccatcaaaatagtaatattagaacatacatgttggctcgcacagatatggaaaatcttgtaagtatcatactaaacattccatgcgtttgtatttttttttaattatactttaagttttagggtacatggcacagcgtgcaggttagttacatatgtatacatgtgccatgttggtgtgctgcacccaggaactcgtcatttaacattaggtatatcgccaaatgctatcccttccccctgcccccactccacaacaggccccagtgtgtgatgttccccttcctgtgtccatgtattctcattgttcagttcccacctatgagtgagaacatgcagtgtctggttttttgtccttgggatagttcgctgagaatgatggtttccagcttcatccatgtccctacaaaggacacgaacccatccttttttatggctgcatagtattccatggtgtatatgtgccacattttcttaatccagtctatcattgttggacatttggcttggttccaagtctttgctgttgtgaatagtactgccataaacatgcgtgtgcatgtgtctttatagcagcatgatttataatcctttgggtctatacccagtaatgggatggctgggtcaaatggtatttctagttctagatccctgaggaattgccacactgacttccacaatggttgaactagtttacagtcccaccaacagtgtaaaagtgttcctatttctccacatcctctccagcacctgttgtttcctgactgtttaatgatcaccactctaactggtgtgagatggtatctcattgaggttttgatttgcatttctctgatggccagtgatgatgagcattttttcatgtgtcttttggctgcataaatgtcttcttttgagaagtgtctgttcatatccttctcccactttttgatggggttgtttgtttttttcttgtaactttgttggagttcattgcagattctggatattagccctttgtcagatgagtagattgcaaaaattttctcccattctgtaggttgcctgttcactccgatggtagtttcttttgctgtgcagaagctctttagtttaattagatcccatttgtcaattttggcttttgttgccattgcttttggtgttttagacatgaagtccttgcctatgcctatgtcctgaatggtattgcctaggttttcttctagggtttttatggttttaggtctaacattccatgtgtttgtattttataatattttggagaaaaacttcttttcccaagagggcaaatttatttgcctggttgccacaaaggtgatggtcaagaattgatagggagatgtcaccagacacagacggagggtaggagcttctccagcataagacacagctcatgtggaggtggcctcccagagcaggacaccgcagcgtccctggctggcttgacagcatccctccctgtccttatagtctttaacagccacacgttgcccaggattcagcctgttcaggtcttccaaaaatctcaaggagatttttaaatcatctcggtcgctgccatctgctaagtacccgcccaccaagttcatgttactcgtcacagttgcagaatattcctgatgagaatgctgaaaggaaaatgatgtttcaactcagctgcccaaatatcccacccactctggcaggcttaggctttaggactgtctgaactcactccctggagtctcatagtcattttaaggtacctttgtcagatatcacttaaattacactatccatcactacatgagtgaaattagttctcaaatttttgttcatagacaaaaactcctgtaagcaataattgatttcctttatgactaatgtgcaaacatcagtgtttctataaggggcaaagtaagctacctcaccaaggtgttaatgttgtttgaaatacatagtatgtagataactatggacccttaatacattcataaaaatgtgaacattccggaaatagccagtagctggctgacagcaatgaaatgttccctctgtaccagtttttacaggttgatagcaggattctcccagtatttggttaccattttttcagtgttaaatataaaatactgcataaatagtgaagaaacatggaatactagaattcattgaatgtattctacatcagattgacactaagaacaaaaagtgtggtgaaagtgtctccacatcaggtctaggtgggaaacactgcttaaatagcaaattgagtatgaaagtatgctgcttatatgagtaaaatcctataaagagaaggcttgtttcctgatgggtatggataggcatagagacaattctgagtatgttgtattctaagggaaacgttggcaataagcaggaaacctgtgacatcacctgtttcagaaagttgtatggtaaggatgcaggtatataagatggtgcagagagcagctgtctgcgtttgatgacatacccggtgaaaggttaaaaggttttgtgttgtagtttttttggagggtggtgtttgtttatttgttctggttttgttggataatttcttaatttatgctccatctgtccttttacctttcttctataataaatatgttgaggctctgattagaaaatatgttatcagtaggaaatttactgtgctgatctgattttgttgtagttatcaattcttttattctgcagtctttgacattaagaaggtaatgtttaacagattacagtgtttctaagaaataccttattgtgtgtaaatcccataaggctggaggcagacctgcctgtattcagcgacaggtgttggctaacttggattctttctattgatggtctgactcactactgtttgacttgttttaactcaaaacaagttaattaatctggtataacttcttatagtacatttttagttggtatctattagaataacaatacagtgactcttacattttctttttgtgtctctgaatagtgtctagggcgaatccaagtgcctaaatattaagaacagggcataagagggcatactttttagaaaaacccattagggacatgaacacaatttttatattttatcacaattaaatgtttaccaagaaaagcagctagacatttgagatggtcatgattcttttagttgtaacagacccattgcttatgcctagcataagagaaaagaaatatatctgtacaaatgaaaaatttgtgctttttttttggcttcagtcatagctggttctaggggctgaatgatgttatccaggcttggcctctccatcttttgcctctgccttttatagctttggccttattctcaggcacacactttccaagtggggaggcaggtggccaccagcagctctcaacatatcataagctaaaaggaggaaacacagctacttcagaaatatttcatgaagggctccaatagtctcttcttgggttgtgtatccacttatttgaccaatgactatgggaggaggcacacttaatgctaagccaccatagccacaaaggtaaagggaagttccttaaggaagggatcttggacaaataatatatagtcacttcaacactatattgcttgtaactttcttaatcagggcattgtgagttagtcactcttttaatttctgtttgtattagtccaacagagattcggctggtatttcccttaggcctccagcagtcttctgcttttgggtcaagccttgagcctgcacaatatcgcagatatgcaacccctgtcattttgatatcgtactcatttgaaacttcactgaagagacacttagaaaatgagattaatatttacagtgatatgcagtctatgatttatcattaattataaaagaaatgacataggatctttatatcttgttttagatggactaatagtcctttattttctgaatgtggtttttatataaacatcaaaaaggaaaatttttttttagctcttttgttttcatgctaagtttcttgaaagctacattctttgcctttacttcttatgcacttttctacctgttgtgatctaacatctgttcctacaacttcctcatcagcagctcctgattattagtaaatctctgggcatgtttcataattttcttatttgactgcattgctgcatgacactgttcatctctttattctttaaaccgccaaatacctatgtcttagtcagttctggcttagtcagttcagaatttagtctggcctgactgctttaacaaacataccatagactggtgcttaaacaacagaaagttatttctcgtagttctgtaggctgggatttctaagatagagatgtcagcccccttggagtctggtgcagacctgcttactggtttgtcaatagtcatatacttgctgtgttctcacatggcagtgagcagaggcagagaagaagcaagctgtctcctatctcttataagggtactaatcccgtcatgagggctccacccctgttacctaatctcctcccaagggccccacctcttaatagtgtcccattgtgggttagggttttaacatactaattttgggggcccaaacgtgcagttcgtatatctacaaacatataccttggctttccaatcattgtactctgctggtttttccacctctatgcctactgcttttctctctcttttatgtgttatttttccttgtccttaaatgtgtcctgctgcaggattctgtcctttttgttttttccctgtacttctccctaaaacatctaagcaaattcagttgccatttatatgttgccagtgtatatgttcccatttatatgtgccatatatgttcagttctgtatttgcagtcctgattacctgtatctcatatccatgtatccagctgccccagacatttcccagtggccgtctcatagacaccttaaaccaaacatgtaaaaattgggttcattattttccctgctcttccttctcttactcctgtattctctgtcacagggagccatccatagagttggcaaaagctttgactcctctgtctcattcccccatatccaaccaaatattttttattttctctccttattatctttggaatgtattagtgttctttttcctcattgcgattcctttggtctaagctgccttcatctcttactaaaattattgcaacatctttaactggttttcctgctttctgacttgctattctttaatattttttatcctgtttccagagtgagtatattagagtcaaatctgatcatgtcacttccctacttttaaagccctttcatgtctccacagtgccctcaggttaaagctcttactcttaacgtggctaacaagacactttataattttgccacagcttccattttgggtctcatctctttgccattatgttctttttattctttatttaatcataatgaattaatttaatgtctctcaatctgacctatctcctaactttagacttggtttttctctctagaatacttctccttgaaattttctcctttttcctcttctcagataactcctagtagtttttcagatctcagtttagatagttctttcagaattaaagtgctattataaaagtaattatataccatatccaagtgggatttatcccagaaatgtaagcttgattggacatctgaaagtcagttattgtgatacatcatatcaacagagcaaaaaacaaaaatcatatgattatttaaatagatacagaaaaaagcatttgacaaagtaatcacttttttatgaaataaaaatatttaacaaactaggaatagaagggaacttccttagatgagtaaagggcttctatgaaaaccccacagctcacatcatacttaatggtaaaacactgttttctttctccccgagatcagccacaaaacaaggatgtctgcttttgccatttcattcaacattttactggagattctagcctgggcatttgattaagagaaagaaattaaacatatctagattggaaagcaaggtgtaaaattatctgtatttgcagatgacattatcttatatatagataatcctaaggaatccactaaaaaactcttagaattaatagatgagttcagcaaagttgcaggatactggatcagtataaaaagtcaatatgcaaaaaatagtatttttatatatgagaaatcccaaaatgaagttaagaaaatagttctgttcataatagcatcagaaatttaacaaaagaagtacaaaacttacactgtgaaaactacaaaatattattgaaagaaatggggaaacacatattcattgattgcaacataaaaaaaatagagatagagatagggtcttgctatgttgcccaggctggtcttaaacttctggcctcaagcaatcctcccacattggcctcctaaagtgctgggattacaggcatgagccaccatacccagccctgatcacagtacttcacattgttaagatggcagtattccccagactgacatacacattgagcacaatacctattagaatcctagttgacttctttatagagattgacaagatgattaaaaaattcatgtaaaattacaaaggtccaagaatagccaaaacaatcctgaaaaagaacaaatttggaggactcatactttctaatttcaaaacttactataaagcaacactaatcaatacagtgtggtactggcacaaggatagacataatacatcaatggagttgaattgagagtctagaaataaacccatatacctatcatcaactgatttttagccagggtgccaagaccaatgtggaaagaataggttttttcaacaaatggtactggtgccactgtgtagtcacttgcaaaggaataaagttgggcttttgcttcaccccatatacaaagttaattcaaaatgggtcaaagacctaaaaagagctaaaactataaacctcttagaagaaatgggggtaaatcttcatgaccttgaatttggcaaatgactgttagatataacaacaaaagcatgagcaatgaaagaaaaaacaggtaaattgaactgcatcaaaataaaaacgtttgtgcttcaaaggaccatcaagaaagtgaaaaaacagcccacaaaatgtgagaagatatttgcaaatcacttttctggtaaggaactgtatctatagtatgtaaagaactttttaaacccaatagtagaaggacaacccaattaaaaaatggatgaaagatctgagtaaacatttctgcaaggaagatatacaaatagctagtaatacacccatgaaaaaaacaacttgacattattagtcatcaggtaagtgtaaatcaaaatcacagcgaaataccactttactcccactgtgatgcctagaataaaatgttagataataagaagtgaggatgtggagaaatctaatctctcatacactgttggtggaaatgtaatatgatgcaatggctttgaaacagtctggtagttcctgaaacaatgaaacagttaccatatgatccagcaattccaaggctagatatatacccaagagaaatgagtatatgtctgcaggaaaacttgtaaatgaatgtttatagaagcattgttcataatagcaaaaaagtggaaacagttcaaatgctagtcaacagaagaatggataaatgaaatgtggtatgtttatgcaatgagatattatttgacataaaaaggaatgagatcctgatacatactgcagcatggatgaactttggtaacatgttcagtgaaagaaagtcacaaaaatctacatagtgtatgattctattcatacggaagtccagaatagggaaattatagagacagaaagtggttcctttgggcagggtagataggggtctgggggaggtgatagttaaagggtatggggtttgtttttgagataatgaaatttttcaagttgcctgtggtgatggttacacatatttctgagtatatggtaaaccattgaattgtgcactttgaatggattgtatggtctgtaaattgtatctgaatacaaatatttaaaagaatgaagtactattctgacatagtctcattggacccgttacttactcttacattattatttctttgaatataccatttgcttgtgtgtcttgtcaatattttcagtactctattggtattatgtactataggtaagatgtgctttctacaggcgtagccaaaaaaaaaaaaaaaggcataaaatatacagtcacatgttgcttaatgtggggaggcgttctgagaaatgttttattaggtgattttgtcattgtgcaaatatcatagcatgtacttacacaaacctagatcgtagagcctaactacacacctaagctttatggtgtagcctatggctcctaggccataaacctgtacatcatgttaccgtactaaatactgcaggcacttgtaacacaatggcgtttgtgtatctaaacatagaaagggtacagtaaaaatatgatgttgtaatcttatgagacaatacaaccacagactgttatatatgtggtctgttgttaatggaaatgttatgtggcatattgaaaactccagaatcagaattaacaaatgttgagttaaatgactaaaaaatgtaactatgcttactaggtaatgtggaatgtgagtacaatgtattatgtttgacaaaatgtcagaaggaactccgaagacaagaatgcctgggaaaagagacagagcaatgactgcttggtaactggtatacttcgttcctggaagttaatagtgctcatgcactgaacttcataatttagaggaagttttagctacaacttgtaaaagaacaaaacataccagtgccacattttaaaagcttcctgcaataggtgtgcctgtcaaaacacgtatgccccaggcataccagcttgttttggtgggctttgcataccagcctgtgctttaaggacttgtatgtgtaaacaatttgctcattacatgtgttgtctgatttagatgatagatttttttttttgcctgttttctagcattcagtggatagtgttcatggttgtttccaacaagacatgctatgtagatagtctgcccatctttaataaataatttcagtaacctccttactttagtgaagaaggaacaaattgaaggtgtcaatgatttgaaataagcacaatggtaaacagcattatgaaatgaaatgtttgatagatatactgaagagcagatcttaatacacatgttgagaaaatgcaccttgggttccaagagtctaattacatatttatttaaaatatatttcttgaaatatattttttacttactagctttaaaaaggtggtgctaagcacataaattaaaaagttaacttctgagcagctgtgctctccccgctactcccactttttggttaagttgggagaaggcaatgtgacttcttaaaatcttcaaaacaaacaacgagcctaaatggtccttgcagatccaacctttatgttggttagaccttaagagaccttcacagagttagtggtgattttctccactggcatcttagctatacatttggaaaatacattcagtcagaagtgggtttatatggttttttctctaatgaaaaatataactgatattaaagcaaagagcacaaaatgaaagtgtaaagatttaaaacatttggatttataatgaagtattgaaatagtcaattataatttttattctctaggttttaccaattcttgagattctgtatcatgttgaagaaaggaattcacaccatgtgtatatggcccttataatattgttgatccttacggaagatgatggcttcaacagatccattcatgaagtggtaagttaccattacttggattagagttagagttaacagaacagacatgtccctacgtaagatttactagtctttacatttctttctggtagatgttcctgtgagaacctgtattagaaatgttatgtctttcttcagatttatgaagcggtgctttttttttttttttttcccagaatgactattaaccactattaaaaactctctcaaaatggttctttggtaattgatacaaatgcttttgctgctactgggttcatttttcttcagcatttcatttccactttttcattgtggcagaaattgtcaaacaggtttgcttcatgcatacagaattagagaagaaaaagggaccaaaatggaagaagtttgagaaatccattgttttatatatatatttttaaagaacataacataatttaactttttaaattttggtcctgttggagagttttattcccaaactggtcttatgtttctctttggcatttttttattttattttttgcatcaaagtaatacacatatgtagttttaaaacttgtatagaagtacaaggttttaatgaaaaataacagacccatgttcaccctatttctgattcccactcctgtaaggcaaatgctttcagttctgtccatgtttcgaagtaacatacttatattgtgatttcttgatttttcagttgcagacattaactattatcgccctaagatggaagatagtcattggttcttcctgcattccacaaatgttccctctgggttcccagcacgcttgttggcacacagactttttcctttttccatcttattaccatttttggttaactcagcttttacattattatttttgatgttatttttagttcagctgtgtactgtaggataattgcgtttcctttcttgaacatgttttaccatttctgtagcacatcattgccctgttttttatttgtgtactaatacactgattctacccccaatacttcaacagaactgaaaatttgctcaaaatatattcaaacttaccgaattttctttttggactcctgtctttcctggagcatctggtggccctggttgatctgttcatctgtaggagtaagcactaagaagtcgattggaagtcctgtgtgtgggcaggtcttacttactgtaccttgttgtacatagtctctttctctgggactgtgtccctgcaggccattttttgggtggattgtttttgattcttccagtctccttgctaggggttctataggagaagggggcagggctttcactctttataagggtacagacactttgttttctcctcattttcagtagggcttttatattatatttactcctctctaatgttcccttaagtcatgtttttgcctcttacatagtatgaccataatttcaactaagatttaaggaatcttgaccattgtggaaggagtataaaacatacaaatttattttttgtgtgtatatttaagttatacaacttgatgttttgatatattaatacatgtacatagagaaatggctactatagtcaggtaaattagcatatccatcatctcacatagttacctcctttattttttgtggcaagagcaatgatactctcctttggcaaaaatcctgaatacaatacagtatcattaactatagtcctcatattatacattagatctctagacttcatgccatatacctgtaactttgacctatatctcctcattttctcacatccaccccctggtacccattgtaatatcctctatctgtgtatttgactttttaaaaagataatccacatatatgtgagatcatgaagtatttttctttctctggtttatttcacttagaataatctcctctaggtttacctatgttgtgccaaatgtcagggtcttcttttttaaggctgaataatattcctttgtttatacaaccatgcactacttaacaattgggaagcattgtgagaaatgtgtccttaggcgattttatcattctgtgaacatcgtagagtgtgcttacacagccaagatagtgtagcctactacacgcctaggctgtgaggtatagcctgttgctgctggccacaaaccagtacagcgttgttactgtatactgtaagcagttgtaacacaatggtaagtatttgtttatctaaacatagaaaagctaccataaaaatacagtataaaagattttaaaaggcacacctgtatagggtaccatgaatggaacttgcaggactggaagtggcactgactgaatcaatgagtgagtggtgagtaaatgtgaaggaccaagacattactgtatgctatcgtagactttataaacactagacacttaggctacactaaatttataaaaatatttttctttaataatcaattacccttagcttactggaacttttttactttataaagtcaccacaaacacatgaataatgtgttgtgctacaatggctacaacatctaggtgataggaattttgtaataatcatctgggaccttctttgtatatgctgtctggcattgaccaaaacattgttatgtggcaaatgactgtatgtattacattttctttatccatttgtctgtcgacggactctctggctgtgtctgtcttggctattctgaatagtgctgcagtgaatgtgggagtgcagctatctttataggtggtgatttcattttccttatgcccagaagaggaattgtgagatgatacactagttctatttttaatttctttaagaatctatatactgtttctcaccttggtggctccaatctacatttccaccaacagtgtgtaagggttctgtttcctgcatcccctcccgtacttgttatctcttgtctttttcataatgactatccacactggtgtgatggttttgatttgcatttccctgattaattatcagggaaattttgagctcaaaatgtgattttgagcacattttcatatacttgttgaccatatttatgtctcttttggagaaatgtctattcaggtcctttgcccattttttaatgggattgtttttctgttattgagttgtgtgagttctttatatattttagatactagccctttatcagatatatggtttgaaaatattttatatcaattcagaggctgctttttcattttgttgattatttcctttggtgtgtagaagctttttagtttaatatagccccattaatttatttttgcttttgtagcttgaccttttgatgtgaacatagaaatttcttggttcttgttttcagtaaaatactatgagaagtaatattttcactgatgtaatcaactttttaaacatgacttttcttttaataaggaattaaaaacaaatatgatttttaaaaacatcttaaaattgaagtataacatgcatataaaacacacaaattttaaaggaaaactaatgaaaattacattctatatttgtgtcattaccacccagataattatttgcttcagcagcagcaataacaaaataatcagaacaagaaaaagtaactgtaaccacacaaaaaactttgaagcaaacatgacaaaatgttagtttttggcataattcatatgtggttatactttttattgtgctattttctatacttttctgtatcctcattctataattaaaacactttcaagttagcagagaattttgcattaaaattaaacttcgctgactgccaaaacagggttggtaagatagggaaagttcagttcacattgagttcagttccattggatttcaggatattttagatgacatttcaaattcaaatattgaaacacttgttctttttctctagaatctgactttcttgttgatctcgatttattttggtcccttccctttccatatgtaatagtagaaaagagtaaattcaaatgttttaccaagtttctctacatggaatcattagtgtgaacctaattgcctatgatatatatattgttatctcattttgatttgaatttgcatttcttaatacccaatgatacagagaatttatttttaatgtgctttttgtgtgcatatatatctttttgccattttttaaattatcttttttattttgaaataattgtagattcacatgcagttttaagaaaagtaagagagacctcatatacccttaatacagttttccccaatggcaactgtagttgtaaaactgtagttcaatatcacagtcaagatatttgatacttttgtttgtttgtttgtttgtttgtttgagacacagtctcgctttgtctcccaggccagagtgcagtggcaggatccagctcactgcaacctccgcctcgtgggttcaagtgattctcatgcctcagcctcccgagtagctgggactacaggcacacgccaccaggcctggctaatttttgtattttttattagagataggaatgtttcaccatgttggccaggctggtcttgaactcctgacctcgagtgatccagccgccttggcctcccaaagtgccaagattacaggtgtgagccaccatgcacagcctgacattgatactttttaaggtatagaatatttctatcaccacagaattatatccctcatcttgctcttgaatagccatacccccttttaaaaacttggcttatcttattattgagatgtaagaattttttattctggatcttttgcttttttatattctagtttgttaatgtgaattatactggttattgagaattatagtgattatttattgaatattaaatcaactttgcatcctggggtaaagtgcacttggacatgatatgtttttaaatgtattttcatatacagtatggttgagttttgaactttgtgttttctgaggaatttgtacatttcttttaaggtaaagaatctattacaataaaattgttcataatatactcttattacctcttctttttttttttaaaaaagttaccttttaatgtctgtactagccatagagagattacccttcattcttcatgctgataatgtgtctattctcttctttatctttctaactttttaaaaaagttaaaactttaaagaactagcttttgagtctattgattgtttttcctccattttttgttttctattttaattatttgtgctctttattatttcttttctcctgcttacttgagcctcaatttgccttttttttccccaacgtttcttaaggtagaagcttagacctttgattttacatccttctgcttttccactgtaagcaaaatatatgaaaatggttttcagactttggacaataggcagcacaggagagtaatgctagaaagaaaaaaatgtatttaacagtaattatttttaagaatttgaaaatacattaaagtcaaactttatcactaccacctaagatgtgaataccttgacgtaagacaaattattctactgttttagtgtaaatgatcatactcattcattaactagaattagaactattaacattaggtgaacatcattttcagaaaattttcttctttttatttaagttgagacagggtctcactcttgccacccatgctggagtgcagtggcacaatcgctgctcactgtagccttgacttcctggtctcaggtgatcctcctacctcagcttcctgagtagctgggactgcaggtgcatgccaccatgcccagctaatttttgttctgtggagatgggtttcgccatgttgcccaggctggtctcaaactcctggtctcaaatgatttgcctatctcagcctcccaaagtgctgtgattacaggtgtgagccaccataccagaccttcattatgcaatatattttttaatattattatatggtgaagaaaagagattttggaaagctaagatgttagaatcattgtttagttattttaaatccatgttgcagctgtagagagaaccagtgtatttcttagtgagaagcatgagaacattattaattccacacttcttttcatctctttcttccaattttttgttagtttaattatttaattttgtaaaaatttttttgagacagagtctcactctgttttacgcaattctcgtgcctcagcctcccaagtagctgggattacaagcaagtaccaccacacctggctaattattttttttagattattcaaaacttataacatttccattctgttttgtaactcaaattgccaaaattgcctaatactggttttattggatgtgttgtctaccatcagcccttttaccatagtttagtttctgtatccctgagtttgttatttttattcatcatcttctatatatctggcttttgttttcagtattttcttcacagaatatttctttttttttttttttttgagatggagttttgctcctgttgcccaggctggagtgcaatggcgcaatctcggctcaccacaacctctgcctcccaagttcaagcgattctcctgcctcagcctcccgagtagctgggattacaggcgcccgccaccacacccggctaattttgtattttaagtagagacagggtttctccatgttggtcaggctagtctcgaactcgcgacctcaggtgattcactggcctcagcctcccaaagtgctgggattacaggcgtgagccactgtgcctggccttcttcacagaatatttctgtggcatattttattcaccttctcatatttgaaactgtctgaaggttctcattttctctcccacacctccttccactatttagtcagaagaagaaacaaataaataaacctaccaaacttgtttctctctctagatttggggattttcatcagaattttcaggattttgtcaatttttccaaggggctgctgccaggtaaggcaggattcagtcacacatgtacttcttgagcctgctctcgggttttctcctttatcatccatcattgaccccagtacacctatgactgtgggcttgggctcatagaagcattttttttaccacatgttaccatgggacagcctgcgatttatagcacatatattgtttagtgagattgtttaaaggactgtatatactttgtccactcccacataggcttgagactagtatatttggtattactaatttggtaagcatttaatgagcatgaaccacctctcatacctgtggtaacggttaaatgaattttaagacacagtcacttttgtagtatagctcctagttttaacttgccaggtaagtcatgtgcttttattctgttctccagattatagaggtatggtagactttgaggatattaagtttgggctctagtctatttgttcaatgtactactcttctaaggcaaaactttaaaattgtgatttcacaatttctacctattaccatgtctagagatgtgacacatttattccttttgatatttctttctctttcctagccctcttcttgtcagatgtagatgtgcttatacgtaacacaaagtattcgatagaaaaatgggcaaagtaatagaaaaacagaatagagacccggaacagtaatcatcgttcaacccgatgcttcatcaggatcatgccaattaaagcaactgaaatattctgtgcctatcagagtagcaaaagtgacaaaatctgatatatcaagagttggtgatgtttttattactatggggttgatgaaagaaaaaagaattggtgaggatatagagaaaaaggactctcatatgctggtagtgggagtataaattggtagaaccactttagagaggaatttgtcctctcaaattcctcaaattgtatacagaaataaatactccacctctcagaagttccatttcagggtttacgttttagggagaacttcttcaaatatgttctcatgagaacatatttgaaagaattttcactgtagcattgttagttgtattcagaaattgaatacagctccattaatgggagagcagattacgtaaatgaaatattgtaaagcagctagaatgaatgcgtagagctacgtgtattgataataaaactcaaaaaaaaaaaaaaacaacgcccatccaatttcaggatagtggctgcctctggggaggcaggttatcagtgtagaacaatgaggaggcttcaggtactttagaagcaagaatactaacatttaataaatctaggtgatggatacagtggtggtctctataccaggctaatcaatcaaactttctatcctcatagaagtcttctatgactgcactgtaagtatgctcacacctgaaatgtagctagtatggctgaggaatctattttacttttattaaattttaatttaaatatccacttgtggctagtgccactgtgttggacactgctgctctgtgctttttagtgtgttaacacagttaatagtaactactttttttttcttttttgagacagaatctcactctgttgcccacgctggagtgcagtggcacgatcttggcttggtgcaacctccacctcccaggttcaagcaattctctgcctctgcctctggagtagctgggattacaagtgcctgccaccaagcctggttagttttttttatttttagtagagacagggtttcaccatcttggccaggctggtcttgaactcctgacctcgtgatccacccacctcagcctcccaaagtgctgggattacaggcatgagccaccacgcccagcctatacatttatttttaaaagaagatattcaagccaggcgtggtggctcacgcctgtaatcccagcactttgggaggctgaggtgggcagatcacgtgaggtcaggagtttgagactagcctggcgaacatggggaaaccccatctctactaaaaatacaaaaattagccgagtgtgctggtgggtgcctgtaatcccagctactcaggaggccgaggcaggagaattacttgaacccaggaggcggaggttgcagtgagccgagatcgtgccattgcactccagcctggatgataagagtgaggctccaactcaaaaaaaaaaaagaagatattcaatgatttggcaattctgcttcctagtaaattctcgcagatgtacttatgaagtcatgtgcaggtatttttgttttcaaaatctgtgtgattcctgaactgaggtaaaagtctggatagtaagaatatggagagtcaggaattctttctttttttctgactttcatgtagtgagatttaggatagtgatctgaattgtaacattgttttaaataggaaaacaactgtaaatagcctaaatttccattaatagaggaatggatttttttaaaatgtagcctgctaatatagtactctagagtggttacaaggaatgaagtagacttggatatagaggtgacattcaaatgacttaagtagtatgtatggcaccaacaccagccagtaagaatggatgtggaccacagttctttgttctctgctgtatattacctgggggagtggcttacaacaaaagctatttactaactagtattgagtattccattttaaaaaaagaactagtactatcagacaggcatacctggtgaatattcttcttatatgtatcaatataggagggttacagaaacatgctgagtgaaaaaagtaagatgcgaacaaaccagatgtgtgttagtttcttagagctactgtaactgaccaccacagttactgagtactgctgatataaatgaaagatacttagtgtcttctagagttgtctgagtaccacagctaggtgactcctaacaatagaaatttattgtcttctgtagcctgaaagtccaaagtcaaggtgtcagcggggccatgctctctctgaaggctctaggggaagaccctttcttgtgtcatcctagcttctggtggtcgcaggcaatacttggtgtcccttggcttgccatctatctacatcactccagtctctgctactgtcatcacatccttctctcaggaggtgtctgtctctgtgtctgtcttcctcatcttacagtcaccagcagtcatactgacctagagtccacattaatctaatgcagtctcatcttgattatatttcaaagaccctctatccatgtaaggtcacattcacaagttttgaatgacatagatttggggggaaaccattcattctaatacattatgtatggtactatttatgtgtactagaaaacacacaaaggaatgctggtttttggttttttacatatatatgtaggtacatatatgtatatatgcagataaagtaattgaaatggtctagagtatacacactaaactcaagatagtgtttgttcctccatgggggaataaagtgagatatatatattaaaaaatattaacagttggtaatgtgaattgtgggcatatagatgtcaattgttttttgtactttcccaaacatatttaatttttttaaaagagttgatattatataatgttactgtataatactctatcatatataacttatggaatttatttttgagagagtcttctctgtcgtccaggctggagtgcagtcactgcaacctctgcctccctagttcaagcgattctcctgcctcagcctcccaagtagctgggattacaggtgcacgccacctcgcctggctaatttttagtagagacggggtttcaccatgttggccaggctggtctcaaactcctgacctcaggtgatccatccaccttggcctcccaaagtgctgggattacaggcgtgagcctccatgcccagccaaacttttatattttttacttttcaattctaaataatatttaaccaccatgtagtgagtatttgttatatgccagcctctgagtggagaatgcagtcagggtgggcttatttgtaatgggggatgctgggtgatgtggggccagagagttaaacgagtgaaaatatgtgtacggaagccacctgtatatacttgtactttcaaacatattgacatgaaattgagtgtggtattcctttgtgtttttattcttttaatctgtttctgtactcccttctcattcctaatattgtttggaatttttttgctgttgttagacttgctagagaatgatctattttaatcctcttttagtatattatttagatttaattctgttttcctgatttcatggatgactgttgtgtttgttgttgtttgtattccatattctccttctcttgaattcttctggatttgtcctgctgttactgtgttgaggaggggcagctaaatacttacatgtgttgtggtgttttgttttttttttttctcccggagatggtacatgggtggttcatgctgagtttattttgcatcatgcttatgtggtagtttctcaagatgcagaattctagaatcataatgccttccctcaaaaatcttgagacattgttctgctgtccttcagatgtgtagtgttcaagatgggaactctaacattagtctgcttctttttccgttggtggtaacatgttcttctgtctggaagccaatggaactttctcatatactgcaaattcattaatcttgcgagaatgttttgattgtttttcatgatttttttcttggaatgttgaatgtttttcttttcctctcaaagaaattttctcatattactaattgttctgtttttcttctagtttatttcttctggaatttttaagtggctatgacgtctgcacttttctcttatagtttctgtggagaacttctcagtttggtccttcacatcacaaatttaattttccatagtgctcactctgctacgcccaggctggagtgcagtggcaacatctcgtttcactacaaccttcgcctcctggcttcaagcgattctcatgcctctgcctccagagtagctgggactatataggcgtacactactacacccggctaattttttgtattcttagagagtcatcattgggccaggctggtcttgaactcctggccttggactcccaaagtgctgggaatacagacatcagccactgtgcccagctgccatgatacttttataatcttaagcgactttgcttttgttctgtgattttcccttttcatagcagtctcttcttattttatggatgcaatattctgtcaaatctcactagatatactaatcagaatttttttaaaaaattccagcttcctaaatcctctctctttaattagaggtctgtttgctctccctgttcagtttcacagtttattatttatttatttactttataaagtttttattatgaacactatgaaacttaaacataattggagaaaatagtagcatggatcttcatgtagtcgttattaacactgtgctgttcttatttcatctacccactttaccctcagcaccttttacgttttgatttctattttttaaaacaaatcttccgtataatttcatgtgtaaacattttagtgtgttctttcagtaagtatggactttaaaaaatatatcataccattagtacattcaataaaatcaacaataatgtttaaattcttcctaacaatttattatttccagttatctttaaaatatcttctagagttgatttgtttgaatcagattccaacgtctactgcatttagttcttaagactcacaaatctatagcactctctccctatcccagcttattttaccccttatttgttgaagaaactgggttatctgtttagtaggattccccgaatttgtctttagctgattatgtatcatcacggtatttaacgtgttctgtcctctgtatttcatgtgcactggtaattagaagagagtcttgatttggttcagcattatcactttcttaggttgaatgtcttcacttggtggttttgttattcatctgtagttataaacacaagtctaactaacttgttttgcaaggtggtgggttcccccctctgcatttgtgagtggtggggagtctgctgtactctgtggatgtgtgcctcttcttaagagagagggcaagaatcagcccagcagtctcttcctttttcatgcataggtagagaataatgtggcacagtgactctccttgagtcacggagaaaggttgcaggagtaaccttaacgaaagagaacattagggagttctagtgctcggctgagcctgttggtttgttttttttttttgttttttcccccattttacctctttctttggggcagcccagatttggctgctatgctgcccagtattcgcacctgtctgccggcctgcctgcctatctctctctctctctctctctctctctctctctctctctctctctctgtgtgtgtgtgtgtctctctgtgtgtgtgtgtgtgtgtgtgtgtgtgtgtgtgtgtgtctatgatccctaggttacaaatctacagtggaaatgtcttaacttagaaaacagttcttgcttacttaggcccggaggtgtgcgccagagctgcctactctccacagccatggcagagcactggagcatctctccttgaagatctggactcatttgcgtggcctctgtctgtgctgcttaactcaccttcagagcaaagtcatcgtttatcaaaaattgtggacatggagtaattcttttgtctgtaaagcaatcattttttacttaaacttttcttccccattacagatactaaaaaatattacttggtattcagaacgagttttaactgaaatctccttggggagtctcctgatcctggtggtaataagaaccattcaatacaacatgactaggacacgagtaagtattccagctgctattctatcttttttgcatacagtacaattaagacgatagtttaaagcaatcccaatttttaggatgctaaaattctcgtgacatatggtagaaaataccggtcactgtatagtcactgtattacatgatcctaatgtaacataaggtcttaatatttaatggcttgtatgattggagatattttacatgaaatagaaaacaagcaatgcaaaacatttagataaaagctattgtatgtctttatttggccagtaacactgatttgccttttttaatagcagcaaataacaaagtacaagaggatatgagcacaagaaaatatgaattaaaatgaaaaagaaaggtagaagagagaatattttaaagagtaaaagaaaaatttctgctggattctcttcacagtacctgggagcaaatttcagttctggttaatagaaatatattattaaagagaagcagtgtacagaattcatagctaagagaaatggcatttttttttttttgagctacgattgtgccactgcccttcagcctaggctgcacaggagtgcagtggcacaatcatagctcactgtaacctccaacccctgggcttaagtgatcctcttgcctcagtctcctgagcagctaggaccacaggcatgtgccactacacctgactaattttttttttttttttaaatagccaaagtctcgctatgttgcccaggctggtcttgaattggttttgaactcttgtcctgaagtgatcctcccactttggcctcccaaagtgttgggattacaggcgtgagcccctactcccagcccattttcagttattttcctccgtggggctattgcagatacacattcatgttttttatctgaaaccctaggagccagctatgttttagaaagcagaagtttttggattttagaaagataattatagtttatatactctactatgtgtaaccattagggccttaagtagcatgctgtaattaaacgttatatttctgtagcaaaatatttcaatattcaccatggagggaataatgaagactgtcaggaacatcatcattttttgtgttgtggaaaaaactttgaattttcagtgctttatggatttaggaattagaaaaaagagatagtggatctgaactttctaaaatcagtgacaactgagtttacatttgcttctattaatagttaaccttggttaaaatatagagaagacttgattgtatgttttacacccgctgtttcctcacaggacaagtaccttcacacaaattgtttggcagctttagcaaatatgtcggcacagtttcgttctctccatcagtatgctgcccagaggatcatcaggtaaatatgaactttaaaagaaatactgatttgcctctggctgagctattaagatggatactatggtggttcctttttaaatgttacctgtgaggactatcaaattttcctacttaatttttatcaccttcttgtttggttgaaaatagctcgttccattttgttttctaacctaactttttgatcaaagttaattgtatttacattcaatctttttataaaatgtaattttaagtgtaatgttagttttttagaggagcaggtatatttcttagtaatgcaaattaaatatgaatgtatttgatgcgcattttatagagcatcacactacacttttaaggatttatctgtgtgcgttttagagaatttttatagcagttcacccgtgtattagtttcctattgttgccataacaaattaccaaaaattagtggctgaaagcgcaaactggtcattttaaaattctctagtttagaagtccactgtgggtctcactaggctaaaattgaaacagagctgcatttctgtctggaggctgtaaaggagaatctgtttccatgcctcttctaggtgttggaggctgcctgcattccttggctcatggccccttcctctgttatcaaagccagcaacagtagattgttgagtccttctcatacctcatcactctgacctcctcttgtggttccctcttccatgttgaggactcttgtgatttcctggacccttcctgatccaggattatcttccatctcaaagtcagaatcataatcacaaggtcgcttttgccatgtaaggtaacattcataagtccaggggattaggacatggacatttttgagggagccattattctgtctgccagaaacccttgtctcttccccacccattgccaaagacatgacttttttttttttttttttttgagatggagtctcgctctgtcacccaggatggagtgccgtggtgcgatctcagctcactgcaagctccacctcctgggttcacgtcattctcctgcctcagcctcccgagtagctgggactacaggtgcccgccaccacacccggctaatttttttttgtatttttagtagagatggggtttcaccctgtaaagacatgactttgaaggataggaaagctaactaaccagtcataagtgaatatcattgcagggctttttagcatatgggggtacttttttgacttcctgtaggatgttcagtgttgtccaagtaggtctcaaatagaaccccagtgaagtcatattgtttcctttaattcttacttttggggcaatgcagggtttctcttcttcttttttttttttttttgagacagagtctcactctgtcacccaggctggagtgcagtggtgtgatcttggctcgctgcaacctccacctcctgggttcaagtgattctcctgcctcagcctcctgggtaactggaattacaggcacgcgccaccacgcctggctaatttttgtatttttagtagagacagggtttcaccatgttggtcaggttggtctcaaactcctaacctcatgatccgcccaccttgtctcccaaagtgctgggattacaggcatgagccactgcgcccaggcttttcttgtttttttaaagacagggtttcactctgtcaaccaggctggagtgcagtggagcaaccacagctcactgaaagctcaaactcctgggctcaagggatcctcctgcctcagtctgggcatgtggttttgaccattcagttttgtttagcagtcattggtggtgataacaactccgtatcacttttaaatgctgatctcacattctcttcattggttagccattgattgacctgggctcatttttaacttactcaaaattaagttgtctgtttatcttcagaatttagtacaggatattttgcattgactcactatttaatttatgtctggtcttaatacattctattagattgttttttgggtttgtacttgagagatcatctagttgactgacattggaataatgtgaacttcacgatttaaaataaacatagcagtctcctcctaccttggagtttttcaggtattctgaagagcctttagtttccaggagttaacctttgtcaccatgctttatttcaccataacagagttaatgatttctgtgctgctttgtaggctgtttttctgtttatgtgcagttttataatggtttcatgaagatttcattacacaattaacttttctcaaatgataaatgaacatttagcttgtttgatatgaaaatgccaaattagctggttgataatttaagttctgataaaatacatttagcacgattaaatgtttttgagatgcaaacaattttctagttgggaaaaatgcatataaaaacactgtgtccaagttttaatctgtgatggcaaaagtagaaaataaaccaatcatatttgaagaaataagaaacatagtttagatttgtgatttgagagcatttagattgtttatcatcaataatgagtagtgctttacttcattttaatagattgttagttagcataatatgaataacgaactatgttaagcaatgcaagaagtatcaaaataaataataaagtttcctgacctcaagcagcttgcaattcagtagcaggaataagaccaggacccatctatgtgtgtatatatatatatatatatatatgatacaaggatcttttatacagcagaatgttatatgaaatatatattattatatcttaatattacaatgaaagaaaaattgctatggagggggtgaatggctggttccaagaatggcaagaaggcttctcattgaaagattaagcagggtggctacagaaagatgacatgatagataagagaaactggcctgatacagcaatcatcaactacaacaaaccaaagcaaaacaagagagggactatggtgagagagcatgatttatatgtagaaaataaccagtttcatggaactggcatgctgtggacctctatggggatcacaggtgagaggcctgaaagaaacagctggggctattactgtggaggggcttaagggttggactcacagtttagaataatcgaaaggaatggagagaaaagaaggtcttttcttaataacaacaaaaaagaaagtgtgattgaatgagtttttaagtggattttgaagaaaagaatttaaggtaaatttcttgagtcacctgtttgagcagatgatagtatcatggtctgtttgtcgcactgagggaagtgtagttctacccagctcccacatgctgccagcacttttcttgttcaaggaccacatttgagtagccggtgcggaccagagcatcgtgtcatgcaggagggagcttgttggaagtgcggagtgtaggtgtggcttttgacctactggatcagagtcttctttctaacaagatccccagatgatttgtatccacattaaagtttagaaaacacttttgagttttggcctggaaatcattatgtatttcctgagaaaatatttgtcttgagctggaaatgggggccagcttttttgtactttgaggaaactcatttcctactaaatatttgtgtttagggtatagaaatgtaaagtatgataagggatgcatgacaaaaactgtttagatacccagaagggttattacagcagtacaactcagaattcaccagatgctctagtaaccacttcaagtgagaagtaagcagttttcatatacatgattcctaaatcctcttttagaaagagactacacaattttatatttgtcagttgcaaaacttagaagagtcagtatttcacatgatcttcaacaaaatgcaaaacagataacatgttacattgctatgaaaggatgtggataaatctttgaaaagcctccttagctggacataaatgtaaggaatgattccttacagtacctaggctgttgctcatacttaatgaccatgtgccttctacagactcttggtgttctaggagaatcacagatctaatttgagttttgctcaactttgtaagtcttttggatatgccataagtgtgcatatttgctgcgttctttatttgggattatgaggttattgaatttcaagacatttataaagagtagattatatgcaaggcattgctttagattagaaagataccatttacttccagcccttaagactgtcccttattgtctctcatgtccctccactggctgtttcctctggcttctccttcaccctttgattaacaggtagttttctctagtatctcattctgtcttgttttcttctgtctttacacattttctctgggagatcacatatatgtctatgactttatctactgtcatttgtatactgaaaatcacctgataatggttaggctttgtgtccccacccaaaatctcatcttgaattgtaatcctcataatccccacatgtgaagggagagaacaggtggaagtaattaaatcatgggggcagtttccctcatgctgttctcattcatgatagtgagtctcaaaagacctgatggttttacaaggggctcttctcccttggctgtgccactcttctccctgccactttgtgaagaaggtgccgtgcttctccttcaccttccaccatgatgtaagtttcccgaggcctccccagctgtgctggactgtgagtcaatgaaacctcttaactttataaattacccagtctcaggcaggtcttttttttttttttttttttttttttttttttttttttgaggcaagtctcactctgttggccaggctggagtgcagtggcacaatctcagcttactgcaacctccacctcccaggttcaagcaactctcctgcctcagcctcccaagtagctgggattacaggtaggtgcatgccaccatgcctggctaatttttgtatttttactagagatggggtttcaacatgttggcaaagctggtcttgaactcctggcctcaagtgatctgcccaccttagcctcccaaagtgctgggattacaggtgtgagccactgtgcaagcctcgggcagttctttatagcagcgtgagaactgactataacaccacccaaatctaaattcataatctagatctttctccttcactgtactggcagacagtacaatgtagaggataagcacatagcctctgaagccagactgccagggtttgagatctcagctccagaactttactacctatggaatcttggtgatgatgttctttaccttctctatgcagcagtttcccatctgtaagacgggagcggcagcagctgctatctcaaaggattatggtgaggatgaagtgcgttgacatttgtaacggcctcgcacataatttgccctgagtaagcattagctggctgagcaccaaccccactaggttcaccacctgggtatctcatgcttacttcagactttcattatgtttaaaactgaactcgttttcaaacctactcttccttttaaatcccctatcctaggtaatggccctcaccacagtcacctaaattgccaagccagttctgtaacttttctccctttctctcaaattctatcttactggaccctgaagttgtacctaactgccattgtaatttgcatgtatatgctcttctctttctccatggctgctgtcttggttcacatgtgtgtcgtcttcacccacactatgccagtagtctgactgggtctttttgcctccctactcacccctgcacactgctgtattcactggaaaagcaaatctcattgcttcttttgcttaaaaatattaaatggcttcctattgctatcaggttaaaaatctgacctgtgctcttcactgtgattttgccccccaggggacatttgacaatacgtggagattttattgttattgccagaagtgggaaagaggttgctactgacatctagtgggtagaggccagagatgttgctaaacattctacaatgcacactacagaccccacaagaaagcattacccaacgcagaatggcagtagtgtcaaggctgaggatccctttcttaaagtgacatagtctgggccctgccctttgcccttcgtcttcaattgccatttgccatatacccactgcttctgctttactgaatcattacagttccttgctctttcacagctatatcgctgaatctagataaatgtggtctggaactagaaaaaagttgaggcagttctttgtgtcacctctttttttctgtaggtttttctttttcaaccagcttcccacccctttattccatgtcttttatcttgaacctgcagtggcttcttcaacttgctgaggtctccccagttcagctcctaggccttttgtttggaccaagctgctgctaacatagttgtttcatattccccattcttcagattacaaagagaaagaacccatttggccctcttcatctcttcgtagcagcccatggatcactgtcagtttctggcctaggggctagttactggggctagaacaggaaggaaagacccaggaaaggagaaagctacatgttagaagatctggatatggttacctggcttctttcagaagtaggtgtgggaaagatagaacttccaagtcttacctgtccagtgtaggtacttacaacatactggcctggcctggagttgcaagtcctgttgcttaagcagagtaataattactggagataaaagacttattttatatttctttgcattactttacagagagttgctctctctaggcacacaatagacttttaataaatagttagtgactgattcttagaagatgggctggcatctggaatttaaacttagttctggcacccactattctgagacttcatgcaagttgattagcatctggctatattttgcagatgtctgctgccgcttgaaactagtgaagttgatgatctggtgtccataagatgctttagacagtgccagactctattgaaagctttctgggttttcacacctcttgagaataaagtaatacaaagtatagattaggttttaattaaaacaattttatgagagcaatacagttatttctgataaaatttaatcatgcaatttaagaactttaaaattctcaaatccatgacttatgctttcactttttctcacagccatcaggagtgagtatatacacttcagattttaagtgtatggttgtgcaacttccgtgtagtagtctcaagctggcattttatatgagttgccttttcctgccctgcactcatgatgacacatattttaatcacccagcatttttttgaagactacaaaacagaagttggttgttgaactacgtggtcagctcctctattttgggcaaataagatcttttagaccattcaggctcatggaattaaagaaagaaagacaatttgcccccagccttcatttaaataattctttaatagtaacttaccccaacaggcttcctcacttctgttcccactgaattaagttttcatgggtttttttctcaaacatgaaagggaatattaataagcaaattgacctatttgttgggatgaatttatattacacacacacacatgcacaattcaaatatgtaataacataatatatgattatgataattttagaaatattgccttattttttaaaaagtccatttaatgataaatttatacctgccatcctcagtgtctcaccacttatctctcttgtgttacatttaaggctagttgaagtctggaggtttagacagtcgagggtattgactcttcacagctggtaagtggctatcccaggtttgtccagatcaaaagcctggctcactccaagaatggcagaatactctttctgagagtgactcgctcaccatgggaccatggatccaaactcctgggattgatctggaacagacagttctctacaatctaaggtagccgtgcccttggtggtcattcagtttgctttcccctagccctgattccacctgcctcccaatctatctaagtacctaaagttatagtagcaaagacaggaaggtcttttccacttttttagaactgacatgtttgagacaggtatggatgtgttcaggtattacaatacatggtatgtggaaattatcctggaaaagagtgataagaactgtgtgtcttttagcctgagacaataatattttttatatctaatccttgatattaaactttatttttaatttaatacttatgaatgcctaccactgctgaagtcctctttaagatatgtttttattgcagacgaatgccatttgttgtatctagaaattaagtgttatagttggtttttttttttaaacttcgattttatttcaacctcatattattgttagcactgtagtcaggaaattatttctttagggaaggaattatctgatggtaagaattgtaatgaatggttcagttctgtttccaaaaccttgctgagttatttaacttatttttcatctcttgaatgagatatcatacctacttcatttgagtggtgtaagagttaatgatggcttgtaaagtcttgcatctctattttctctattatagtattataacatttttgagatattttgaatctaaaaataaatctggataacatctctacaaaagaatgtattggtctctgctaatattgcaagattctgattccctgcccgatggatttttgaattgcctatattccccaaatatttttctaacaaagaaaatgaagatctcactgaacatagatagaagtttttaataattgttttattgtagattggtaggagatctgagcaatggcttgcagtataaatacttctcttaaatgtatatgatttcattttttaaaagatagaattagcttgctcttgcccaatgcccaggcaataaaaaggttccagtttcttcattcctttggtctttgctgatccttgtttgatcttggcatagcagtaaccaggaaaggaaggaggaatgtttgtcttgaaaatctggcttcctgtatttcctacagccagtggtactttgaaggcagctaagtttttcagggaaatctggcttggtttgcttttttagtttagtcctttcttaaggagttacattgagaacatttagacagctcctctctgaaaatttataagtttccagtagaaaatggttacctattcaaaaaattgctagtattgtacaacagggtgtcttggcagacttgatgggacacaagaaaacttcataattggtttaatttcagtttagactgctggcacattcaaaatgtcagctttaaagaaacatgtcatatgtttatcagattgtttatttcttataagtaaagacctttgtggacaaaattgccacacagcaaattaaactttaaaataacttccatagagctttattgaatgtcaccatcatgttacagaggtaacttggtgtggttcaactttgtcctcttagccatgaattattaagcctccattcctgtttatttttatgaaggttgtaagatttttacctactttcaagctaacaagtttacctgctacagttttgtagattctggtaggacacccaagactcctgggtcaaggacaaaggacagtttgttattgtcctttttttatattttttatcataaattattactcgcagcagtagtaggagccagaatattcatttcttgtgtggttcccatacccacagggcaacatgacaagggccaggtgacacctgtaagtgcagtgggttgcaatacaggagcggaacccagagcttgggaatccccagtcttttatgatagccttcaagcacacctgcccaacctttgctttgaagggagacatctttaatgtatttgatagtaaactactctctgctctagagagagacaccatctctgtcttccaagtctgttcactctacaagcatccacgcagagatagcccggagcacaaggctgctaatgcctctgcttttaagatgtgcaaaacatgagagagtggggaattgtctcccaacactccttacctagttatgaatttctgttgccattggaaaaacctgtcactgtttcagtaaggtagccagttgatactgctctaggttttatctctcagttgctaatgcattgtatttaaatatcttagaagaagcaaaggatggaatggcctcattcctctttgctttgtacatgtgtcataatgaacctccaactcagatgtcagtgtcattaactccacctctaaagccttatttacaagtcataaaattatagacttagaaggacctttaaagatcatctaaggcaaatttccacattttacatatgggaatattaaaatctcgagttatgtgaccagtccaagtgaacactgttgcagaagcagacaaaaaaccaagtcatctaggttcatagcctagtatttttcccagaacagagagaaaagaggcacgctttctctctgtcttttacaaaattgtgatatttgatatgttataaaatgctaaggccagataagaaaaatagagtgacttaataaagcattttccttcttgatgaattgcatgtgtttcatggacttttaaaaagtaccttttccaagacaaagaaacagtgttgtgttaacaggagaaatgggaataaacaaaggtaaaaagatttaaagtggctcacgtgtccaatgtaaatacatactgaatcagatgttgcagagataggacaaacaagggaagagagaatgcttccttaggagagacaaggatagtttggaaaagctagctttaaaaaggtaggtagataactccctatcacaagtattgtgagttttccgagcatttacaatttgttcatttgttcaatgtccttcagtttcctcctttacaaactgggactactgtcctagggccactgtgaagactaaatgagttaatacatttaaagtgcttagaatggcatctgctgaatagcagtcacctatcgggggaaccagcccccaatatttcaatgtaggttcttttctatttttcctaagtgtcggctggtctgagaaataaagagaaagagcacaaagagaagaattttacagctgggccgccggggttgacatcacatatcggcaggttctgtgatacccacctgagctgcaaaaccagcaagtttttattagggattctaaaaggggagggggtgtacgaacagggagtaagtcacaaagatcacatgcttcaaagggcaataaaagatcacaaggcaaaggcaaaattagaattactgatgagggtctgtgtcccactgtgcacacattgtcttgataaacatcttaacaggaaatagggttcgagagcagagaaccagtctgattagaatttaccaggctggaatttcccaatgctagtaagcctgagggtactgcaggaaaccagggcgtatttcagtccttatctcaacggcataagacagacattcccagagtggccatctatatacctacccccaggaatgcattccttccccagggttgttccttgctgggaaaagaattcagcaatatttctcctactcgctttctgcaagaagaaaaatatggctctattctgcctgaccccacaggcagtcagaccttatggttatctttccttgttccctgaaaatcgctgttattctgttctttttcagggtgcactgatttcatactgttcaaatacatgttttacaaacattttgtacagttaacacaatcatcacagaatcccgaagtgacatacatcctcagcttacgaagatgacaggattaagagattaaagtaagacaggcataagaaattataaaagtattgattggggaagtgataaatgtccatgaaatcttcacaatttatgttcagagactgcagtaaagacaggcataagaaattataaaagtattaatttggggaagtaataaatgtccatgaaatcttcacaatttatgttcttctgctatggcttcagccagtccctctgttccgggtccctgatttcccacaacagttacccagtaattatcaaaggaaaaagatcttccttgttagagggctcacagcaccatgtcttgttcttgatggtgcagtaggtatttgaatgaatgatgaaattctgatacttgaattgagctaaaacaaatggttaaaatctactggctctataggtaaggaggaaccagtgtgcctatagactaccttgtttttgggtttttttcttcttcttcttctgtgaagctggtatccgtcacacacatactggatcctatgcaatcggttatttgtgttatccaataatatgagtattatttatattttataatgaagaaactaaatgtcagagaagtagcttgtctatggacagtgacaacattggtatttaaacctacacctgtgctctgtctacaacaccttcctttgccagtgcttcttataagtgaagttttaaattaaaaacaagtaatttgtgtacttggtcgtttaatataacactttacttaggggcagttgttgccagtctttctaaacatgtgatccccctgttgacatgtttttaaaaactcattgactatctttcagtagttactgactgaaaagatttgagggtgaatagtgggggtcccagacaccctgtgacagatggtctaagcagcttttcccaatcggagttcatgagaaaatcaagtccagcggagaaccagttaagtgaggatttcctcagttctcccaaggagatagtcatacgtagcaaataccctctaaatgagtaggagagaagttagttgatgacaaaacttttgccttcttaggaatcctggtttaaaagatctgtgaggacttcggggtttgaggtccactggttaagaaaaattactataggaactcaatgtgacactcctcctgttaatgacttttttaaaaaaaaatctaaaatgtgcctgctttcttcattagtcaaacatgaagattatattgaagcgtaagagtatttgtctattctttactgaataaactttcatggacccattagtcctggaaattcagaagtatatacaactctgtcataacttactgcctgatatcgacataataatggtatctgagtacataagccaatcagagaccttcatagcattatgaacttccaatttaggatcactcagtattaaatgaatcactgagattctaagtatgttctctgaaaaactaaagagactggttctagcaatgattttttttttcttttttcttttttttttttttttgagacagagccttgctttgtcacccagactggaatgcagtggcatgatctctcagctcactgcaacctccacctcccaggttcaagcagttctcatgcctcagcttcacaagtagctgggattgcaggcacataccaccacaccttgataacttttgcatttttagtagagacagggatttacaatgttggccaggctggtctcgaactcctggcctcaagtgatccaccatccttggcctcccaaagtgctcatattacaagcgtgagccaccacgcccagccctaacaatgatttcttcgtggagtattttaaacaagagtaggtatttaggggacatataatcatttatcagatattttctgtgtggctaccatgtgtcagacatctccaggcattggcaattcacaccatagactcatgctgtcttcagagagcttattgtctagcaggctctgtgttttactgtgatgaaagtgggacccaggagaaggcagcccgctcacctgagtgtcacggaagccttaccagtgagatgattgatgcttgagttatatctgggaagaggagcaggtctcctcttttaaagtagcgaggaggcagctcttttctctgtccatctggctcttggccgttccctaagcttcctttagaaaccctaggtataggccgggtgcggtggctcacgcctgtaatcccagcactttgggaggccgagacgggtggatcacgaggtcaggagatcgagaccatcctggctaatacggtgaaaccccgtctctactaaaaatacaaaaaaatcagccgggcgtggtggcgggcgcctgtagtcccagctactcgggaggttgaggcaggagaatggcgtgaaccccagaggcggagcttgcagtgagccaagatggcgccactgcactccagcctgagcaactgagctagactccgtctcaaaaaacaaaaacaaacaaacaaaaataacgctagttataacttgacgtttttgggtgtacttccctttcagtgacctacagaagacgcaaaacttccttcatcgaacttgactcccacaaggtgatgaaaataaaccatgtattaaaatacaacccatctagaggctgtgtgtcaagctgaccttcatccaattttaatttgttttcttactcaggaaactttatttttcaatgtatattacagttataagatggttgaaatactcagattactttatgcatttttattgttattattattttttgagacggagtcttactctgtcacacaggctggagtgtagtggcacttcccactcagtgcaacctccgcctcccagtttcaagcgatcttcatgcctcagcctcccaagtagctgggactacaggcacacaccaccatgctcagctaatttttttgtatttttagtagagatggggtttcgccatgttggccaggctggtctcaaattcctgacttcaggtgatctgcctgcttcggcctcccaaagtgctgggattacacccgtgagccactgcacccagcccagattactttaaattagatcagcagttctcagccacagtggaatggtggggtggggtgagagcaagtggagtgtaactccaggcagcctgtctgactcatctttgcagaaagacgcctgaagaacatgtgtggtgcatgttgtagtgctgggaaaatggttgataactcgcagcgtagaaggtgacttatcgtagaaactgaatttgtacattattaacttaacgacagtcgaagcataattattatagaagcctcaaatgagtgatcagctttttcctttttaatttgaaaaattcgaaatatgtttgaagagaattatataatgaaactttagattgtcagcccctaccttcggcagatatcagttcttgacaaactatttcatttatttcccctcctttttctccctaccctggattatttggaagcaattcctgacatcatttcatctatcagaattgcattatgtaaagaggtacatttttatgaatatccatttattatttggtccctctacaagtggtggagagaaaaataaaatcaggttaccaccatcttccaaaacatggaaattagccatagttttggtccttagtcatttagaatctgattgagttcggggcttactctatcactcatattgctagtcagtgttatatggatgctgtcttatttaattataagtctagccatctataaggtacagaatttctgtttaataggtgaggaaactgagactcagactgaaacttagccaaggtcatgtagctaatagtgtggagctgaaattgaaatccaagtttgaccctagcgtagaaatgttctttttggcagacctgacattgataaagctgaaaaggataggcagacatcatctaccttatacctgcactcagattctcagttgtgagtgagtagaatgtccactatataaagtttctgtgcagtcttggatcacttctgtgcattgattctcgaagtgtgttctgtgggccacagagagtccatggagtctaagccttttataataagacatcatttgccatttccactgtgctgacatttgcatcaagggtacaatagcaaagttggggtaaaactgctgagaccttagcataaatcaagtggtgcctaactgtactagtactcactatattttccacaaccacacacacatttgtggtaaaataaaaaccatcttcactgaaaaatgtccttggcgaaatagtaaaaatgattagttgttataaatcttgacccttgagtacatctttttgatattttctgttgtaaaactagaagctcacataatgcacttctactccatactgggttccaatgattgtcttgaggaaaagcaggtgtgtgatagagttgtgagctgaactagccacttttctgatggaatagcatttttacacgaaagaacatgagacagtcttggcagagaggaaactgccagtgttggttgccaataaaaaaaattttcaagtcaaaattaaaatttcgaaaaacttatatttggcatcatgagtttgacaacttcctaataatttagacttttgttataacatcaatgatgttagtaaatatggattttaaaaactattatttgatgaaatgtgtcaacatttggaagatctgcataattcagtgaaccaatatctctcaaatgactaaaggggctttttcattaactgtattaatgttaacatgtaatgtgtttattattaaatttaaatgaattagtaaatatttaatattttctcagttttaatatctgtcagtataactgacatatgaaaaaattctttggggttctcattaatatttttaagagttgaaaggggccctgagaaaagtataagaaccagcactctaatgccctttcaggatgagataggtagagtggatgtgagcatgtctgtattacagagttcagtgtatatacttttaaatatctactatttctgaattataccttccttccatcagtataatcaatatttaactatatttgtattattcatgcttccatttaataaatatttattgagaacatagttatcagaggttgaaagagaaggggtatacagaatatataaatcatgtttattctctgtaagagctcatggtctctattctaaaaagtcataaaaaaacaatgttactgtactaaattgccttttaagtttattgcttatcttgcctgggtgtggttatgaaataaatttgttgctgttgtctatttctgtgtaacaaactaccccaaaacttagtggcttaaaacaacaatttgtaatgacctccacagggctttgggttgattgcttagctaactgactctctacttgtggtctcttgtttgccatcgtagagcagctgggctgggtgtccagtgtgctcccatctcaaggctggcagttgatgctagctgggagatctgttgaggtgttgcctggaacacctccaagttcttcttcttgtgaccttgctatgaagcttggcctcctcaccgcaacgcaggcaggttcccaagaggggacatcccaagagtggcagaaactataaggtttcttatggcctagctcagctatccctgaatgttacattttattggtcaaaagcaggtcacgagaccagcccagattcaagaggaaagaaccacagaagggcataagtgctgggagatgtggttcatttgtggccatctttggatgctagctgccacaagactgctaggagactgttgaattaagttttataaattattgcttattgtagctgggaaaatgaatactttcattcttaagatcaatatccaggcttctgttcaaaatagaaaatttaagctgaatccattcaaatgctattctttgcatttttttcctttaatttacatttgacattaacattctctccctgactttttcccatagtttcttctgatgagcaggaaatgtccactatctagtacaggtgtcttcacttatagtcaaaatggaagaggagcaagtgcacagagttcctgtaagatgcatgttcatgtggctgcacttgctggccactgagttgttgatattgaccaaatcttgtctttagtctgagaaaatgtagggctgtgttatcttgtggcagtgtggcaggctggatgttcactctgacaataacagctcaagttctatacaagagaggctgaggggcagcatttggagggtggagtttgagggttgtttgcaagtgccatttaaacagcattcacagtgtctccaatttgattatgtattcacagtggcttggaaatctggctggaggagtgtttctttttttttttttttgagacggagtcttactctgtcacccaggctggagtgcaatggcatggtctcagctcactgcaacctctgcctcctgggttcaagcgattcagctggaggaaatttgatagggagatgctttagctaaagctcccccttggtggtgctgttgcactataacttccaaagaaaacatcttttttgttgctcatttttttaagcaaacattttattggacactaaggtgcaccaggctctgtgctaggcttaggggaactaatacaacagttaatatccttatagtctaatcctggctattaactttcttaacatcaagagtgaagaaataatattattatatactattatattaaataataatattaatacatagctaattaattcaagccagatccattgctgcatgtagacactatggaggcagtaaccaatttgcctaaagatgatgcattcacaaatttcacaattttaaaggttacttaaaagggtatcacatagctcttaaatatagcttaaaatgcacagtttaagtctaataagaaaattgcagtttaaaacttcactgacatgctatttcttacctatcagattagaaaaatccattttccaggttatgtggaaacagaccgtctcaaaattttctggttgaagtgtaaattggtacaactcctatgaagaatgtggtaatatccatccaaatttcaaataacatcaccctttgacccagcaatcctacgtgcatttgtgcaaaatgacaatgtactagtttattttgggagtattttttataatagcaaaagattaggaacaactcaaatatccaccaacagagacctacttaaatatggtacattgatctagtagtgtgcagctgtaaaaaaaaaaaaagagtaaggtactgatggaaggctctttcagatatattacgtgaaaaatacaagatatgaaataatacatgtagtatgtgattagtgcaggggaaaataatatttgtttgcatttatctttgtttacatgcagaaactctggaaggacacacaagaaactgataaaagtggttatggggtgggaggagagctagccttttcactgtgtatgtttttcctctcatctcttaccatgtaagcaccaaaggggcagtgatctttatttttttcactaatggtatccttataacaatacatggcacataaatatttttagaataaatgattcaaaaataactcaaagaacaaaagtaacataagctgattacaaaaaatagagacaaacttgaagccaactgttaatataatgtctgcttccaagtaatccttaaattgatgtcttgttgtataacactctagatgattttctacttgcgtatatgcaatttaaaaaaaaagttttataggcattttccataatataatctatgttgaaagatatatggcctcaaaatatcattgaatttatccagtgaatattgctaatgccatatattacgacatttaagttgtttatataaatgcatgtctagacacatacaaacagctctggaaagaaaatattcactcatgcatcagagacagtgtatgacagtgtgaacactggaatgggagacccacctccatttcttgccagccgtgtgatcttgggaagttacctaacctttcagtgtgtacagtcctttagtacttgtcccataaagtgattgattcccgggttccaagcaggagacccttatggataatttgcttaataaaattgagcatgaagatacctggataagcaactgcaggagagtttctctcttcaagagggtagggctaggtgaactgctcccagatctgatgtgtgtcttgagcttcgttaagcaacaaggaaaaagactgaaagtctagcaggagcaagttcaagatgagggaccactgattccttggttcaccttgctaagttatatttgcaaagagcagatggtttggactaatctgactctctcgtgcatgttgttttcatcctctacctcagaggctgggagttctgcaggcccggctcctacggagtggccttttgggagcaagttcacattttcctatttacttacgttgttatttttaaaagactttgttttcatttcccattgttaattggctcttggaatttacccctgcctatttcccttcctgaatcttgccatttataaagcaatttcttctttccatatattagttttcctaaagtggggtatatttgatcaaattcaaatagttctgaagtaccagtaacatgactgagaatggctatttatttatttatttattttttttttttgagacagagtctcgctctgtcgcccaggctggagtgcagtggcacgatctcagctcactgcaagctccgcctcctgggttcacaccgttctcctgcctcagcctctcgagtagctaggactacaggcgcctgccaccacaccctgctaattttttgtatttttaatagagacagggtttcaccgtgttagccaggatggtctcaatctcctgatctggtgatccgcccatctcagcctctcaaggtgctgggattacaggtgtgagccactgtgcctggcctatttacatattttttaaaaatttgtaaatgggcatttcgcaggccattctcatataagagggagaattggaagtcctttgaaatatgttttttaaaaaggttttaatttttaagttatccaaagtgacacctgtaatgtgaataggacattccagaacaaaaaagttgaaacaaaattatcagtgttttatacaaattttgtactccttgtgtagctagaaatcaaacgtttcatattaaaatgagaattgaattagtttaaacaagttttgtttgcagaagtctctgattccttatgaagaggaaaagaatatgaaaattttatagtattatgtttttatattgcacttacaaaattgagtgaatattgtgtgatgatcgaaagattttaggcattttttcaagccacagttttttttttttctttcacagtgatatatggtacttactggaaattttacttttatttcctaccatatcatttgcacctgttttgctggtgtgtgttgattggtcttattctatctcgtaagtaattactgaccctgactggtctagacactgactggtagcagtgtaatctcaggccacttaaaaaaggactttcttaaaattgggccacagactaaatgttattaagtttgaagtatcacaccatatctttgttgcaactaagaaagtgaaaataggccttattaaagtctgtttaacttatatcattacatctattttaaatttttttcacaacttgaatagtatttcactttagcttctgttattctttagcttttgatcatgatattgctatgtgttgaaaggatttcatcaggtgtatcagtcagatttaggttcaactgtgaataagagaaaaacctaaaatctgagtatcttaaagaagaaataatttcctctatctccaggtaaagtccagagcagtccttctgagactgataaggaggctctgctccagaaagtctgtattagcttccatttgctgctgtaacaagttactgcaaacttaactgcttaatcaacacagatttgttatcccacaattctgtagatcagaaatctgacttggctctgctggtttctctgttccaggtttcacaaggttgaaatcaagttgtaggcctgctgggttcatattgggaggctctgggaagaatctaccactaggctcattaaggttgttggcagaatctagttccttgtgattgtagaactgagttcccccttgccttcctgagggctgcttagctcctggaaacctctctctggtccttacatgtgggcccctgcatctaactggcacatcaaatgatgcttctcatgcttgaaatccctctgacttctgccacatgtctctgactccagacagataaagttctctgcttttaagggatcatatgattagattgtgcatatttggataatccaggatagtctcccggttttaaggacaataatcttaattatgtctgcaaattaccttttgacctgtaatgtaacatgttcacaggttccaggcattagggcatagacatctttgagcaggggaaattctgcctatcacacagtcctcggagactcacactcttttcagatgcaccatcccctaaccatcccctagggtttgatcctccttcttaggtccaggaagcatcttagttcaagccacaggataggggaggaggcaaacaataaaaagtgaagtgagacactgggtgacttttcttttttttgagacagggtctctgttacccaggctggagtgtggtggcacaatcttggctcaccgcaatctccccttcccgggctcaagcaatcctcccacctcagcttcccaagtagccaggactacaggcatacatcaccatgcccaactaatttttttctattttttgtagacacagggttttgccatgttgtccaggctgttctcgaactcctggactcaagcaatcctcctacctcgacctcccaaagtgttgagattacaggcatgagccaccatgcatggccagcactgagtaactcttcagttttgttgttgttgttgttgttttgaggtggagtcttgctctgttacccaggctggagtgcagtggtgcgatcacggctcactgcaagctccgcctcccaggttcatgccattctcctgcctcagcctcccgagtagctgggactacaggcgcccgctaccatgcccggctaattttttgtattttttttagtagagacgggatttcaccatgttggccaggatggtctcgatctcttgacctcgtgatccacccgcctcggcctcccaaagtgctgggattacaggtgtgagccaccgcgcccggccagcactaactcttaatgaaggttctcagaagctgccaggagaccttcaatctagcaatccagaattcaccatgggatcatacttaacagcagtggaagctgagaaatatagtctttattaattgcagccatgtgctctactaaaaaaaatctgttagtgtagaagaaagggagaaatggatcattggggaacagtcaacagcctctgccccaccaagtgcatttatctaatcattggaaaccagcaaactggagggagtgatagcacaactactacattgtgggagtggagcaacagcaccatcataggcaagttagagggacatagggttagattgaagagaaatctgtcatgtaactacatctgaacacaaagattttatacctgaaagagcatctagaagctatttcatctgactgaaaaaatggatgctttttttttcatctgactgttctgcgaaaggtgttttttttcttttttttttttttgatggaatcttgccctgtcacccaggatggagtgcagtagcttgatctcggctcactgaagcctctccctcctgggttccagcaattctcctgcctcagcctcccgggtagctgggattacaggtgcaacaccaagtccagctaattttagtatttttagtagagatggggtttcaccatgttggccaggctggtctcaactcctgacctcaggtgatccacccgccttggcctcccaaagtgctgggattacaggcgtgagccactgcactggccgaaaggtacatttttagatattgtattaaatctctgctagacacccccacagtttgtaaccaatccatgtatttttgtattatatggatctttaattcttacaacatctaaataccttatctactgaaagggagtgtgaaagtacactttaagtataagaaattccgtttcaggctgggcatggtggtcactcccgtaatcccagcacttttgggaggctgaggtgggcggatcacctgaggtcaggagttcaagaccaacctagccaacgtggtgaaacccggtctctactaaaaatgccaaaattagccaggcgtggtggcgcgcatctgtaatcccagctacttgagaggctgaggcaggagaatcgcttgaacccgggacgcagaggttgcagtgagccgagatctcgccactgcactccatcctgggcgacagagcaagtctgtttccaaaaaaaaaaaaaaaaaaaaaaaaggggggggggtccccgccccaaattcggaaccgggggcaaagggggtcccggggggaannnnnnnnnnnnnnnnnnnngcctgcttgctgaccgcagcttactctagagaatcccccgtataagaaattccgtttcaggctgggcatggtggtcactcccgtaatcccagcacttttgggaggctgaggtgggcggatcacctgaggtcaggagttcaagaccaatctagccaacgtggtgaaacccggtctctactaaaaatgccaaaattagccaggcgtggtggcgcgcatctgtaatcccagctacttgagaggctgaggcaggagaatcgcttgaacccgggacgcagaggttgcagtgagccgagatctcgccactgcactccatcctgggcgacagagcaagtctgtttccaaaaaaaaaaaaaaaaaaaaaaaagaggccgggcacagtggctcacgcctgtaatcccagcactttggaggccgaggcgagcagatcacgaggtcaggagattgaaaccatcctggctaacacggtgaaaccccatctctactaaaaatacaaaaaattagccaggtgtggtggtgggtgcctgtagtcctagctactcgggaggctgaggcaggagaatggcatgaacccacgtggatcttgcagtgagccgagatcgcgccactgcactccagcctgggtgacagagtgagaccccttctcaaaaagaaaaaaaaaaaagaaaaaatcaaaaaagaagaaattctgtttcaatcaagtagaatttccgtatggccagctaatacagaaagtgataaattgtgcaaagtatatgaatatggaaagtggggggagcaaatagttccaaactaggataaagcagaatacttcataacgtacctgtctttcaaacaagatcttatcggatgaatagtatttcagtaggtaaaaggcaggggaacatgaaaatcacatgtgtaatttagaaacatcaacagatggcaagaaaaagaattttggaaggtatatataactgaatattattataaaggaattacatgttttaaaattttttatctatgaatactaagttttcttgtctccaacctgtgttccttttcttgcctgcagaagtaaaatcagatacagacgttgcagttttaagagtcatgttgatgtgaccctcttcaaggctagttagtacttacagtttgtatttagaggaatctttgactaagattcctctggtgactttttagctccagatgtgctagtacactacgaagcattgtaacagctgtttatttcattagagttggatctagactgccactacctcagaggaaccagatacaagtagatccactccactttatttgacaaaggaaacatgctgatcctaataaccaaaaggaatgtggcaactcgttcatgtatttcagtatctttcacataggacagtgtaactgtgacctgcattttcacttgggaaagagtcctgggaaagacctaagagaacttaagctgttcagcagtggctgcatacctttggaggcaccatcagagagatggatggaaaattgggtaaagggaggtctacccccaaatccaagattctgtgattctgataccttttactttaaagcaatcattttcaggttctgtgttttgttctcgtactctagatctcgtgctttctttgctggtgtcaacatgagcagccaccagctgctctgggatacccactctactcctcccagagcagctcccctctgctttgatctgtttacacgttgccatttcacatcagctttcattggaagaaagggttccattgctttaaatatatgcatacataagcgcatacatatatgaataaataagttgaaaattagaaaaccctttttaaaggatggagtaatgaggttgatcttaaggttctttgaacttctcaaaaggcagtgtagtagtctaagctaatatatctatctaaaagatgaatattgtgcattagaaaaatagtattcttttagtgacattcatgaagtcattttttaaataaataatggacccatttgattatttaagctctatgtgcattttaaagtatattcatcgtgtagaaatactcttttttgccttttacttatttctacatataggttattgagtttttctgcatggttctgtatctcttttgttctctgccctctgcagaattttatctgatagtagatagaatgtggattcttaaggagaaaatctgttttattaattataaggcgtatgtctcagactaccaaaccaagtatactgagtgttttgaattaaatatttagtgcttcattgactatttcctctgacttccattaagaccttgagaaataactcttctctaataagccttttgtttgtttggggccaatatacagattgatgtggaatgaaccattgctgtagtatttagggtgtggtaagcttttctcaggaacttatctcatttcagtatagctcatttttggtaggatattaacaagtctctgtcatggcaggaaacacttggttttgttcccagatgtctgatagtagttcttttttgaggtagtaagatttttttggatgctagcatgggaaagacatgtgaaaagtgtagagagattataaggggcttgatatcaaaggtttttaaagacaaatggtctgtgcttgaacaggacattagaattgagcttaaaatctataacctaattttcttcttcccttgaatacagttggtatattcgaccagcataggctactgcttcaccttagtgactgttgtttttaatttgttaggacactaaaaaatgtattacatgtagaaaatttcccttttagtaaatagttctttgagttgacaaacacatatagtcatgtatttaccaccatagtgaagataatatgttcatctccctaaagattccgctgtgctgctctgtagtcaaaccattcttactacccaagcccccttctgttatttagttttcctttgccactttgtcataaatcttatcatatggtatttagtcttttgagactggagatttatccatgttcttgtgtgtatcattcgtttttattactgagcaagtattttattctatggataccacagtttatccattcactgattgaaggacatttggatgttttcattttggggcaattatgtatgaagctgccataaatatttgtgtagagaattttgtgggaacctaacattttcatttctcttgggtaaatacctaggagtagagtttcttgggcatatgtaattgtatgtttaactttataagaaggtgtcaaagtattttccaaagtggccataccattttgcattcttgccaacaatatatgacagttctagttgctccacatcttcaccagaaattagtgtttgctttttgtaaaagccattttaatagttctgtggtgctcactcatggttttaatttgcatttccctaatgacaaataatgttgagcatcttttcatgtgttcttttgccatccatgtatcttctttggtgaaatgtctatttagatctttatcctttttaatattgggttgtttgggtttttgagttttgagtgtttgagttttctttatatattattttggatacaagtactttgcaagtatgttgttttgcaaacatttatttcttccaggctgtggcttgttttttctcaacatttcaaataatctataattcccatttatcatttttcccctgatacttgtttatagaccacagtactttattttgtccctgttcttatacctcttattgttatagatttattattttgtctaatagatttattatttgtcaagtaatttggaattattagattaattattaggttaataaatctaaaattagttttattatttgtcaaataataaataatatagaatcattttatgtcttgttgttttcgtgtttaacttttagtaagtatgtgtatactttacatcttcaactagattataaactgatgagtaaccattggttaattttcttaaaaattatgtacaaaatagagataaagggaacagttgaataactaataactgtttattcagatgtgagataaataagaacctgtgtccttttcatcagaatttaggtcttctttggacccagttttcaccttctaggaatggccaccaaaaatgcactttagcttgtcttcctatccacagtaaacttcctcccaacccccatcatgatctctttcatcgcacctcacccatttcctatatccaacagttacaacttttacctgaaaaaggataggtagccttcataagggaccctagttctagaggttggtagaagtattgcggattttgatttaaaataatctgaaataattcatagaatgaataaagtgataactataaagtcttcagaactatttcagtttggccaactgtgagattaatcatgttattctagttctctattctgctggaagaaaatagaaagctttccttttggctggggaccagggatgattataatgattgaatttttctcacttccgtctgcaaaatgtccaaattgtggggttttcttaagattttaagaaatgagcagttaagaccttgggaattattgtgtaagttcctgttgccagtgatttataggcctttgcttactcctaaggaaggaagtaattttatgtttatggttatgactctgaatcccagcccagcctaaattgtgcttgtcagtctaatataaaggtaatgatgatgcatagaactcccatacataagatgacttgtggatcattgaatatggaacattagtttttgtccatttactccagttaataaatatggtggtttcttatgccaagcactatagtgggtatagagaaactaaaataaaaactcaacatctgccctcaaagattctatgattattgagaggggagatagacaataaagccatttacaaattcattttgtgaagttgcatgttggtaggaagcataaggcacagtgggaacctagaagggagagcaccaaaatgtgcatgtagcaatcggggagggcctcatagaagagtcacacttagtgaagagtaggagttttccagaggatacggagattgaagaagtatctccagatagtcagcagcaggtgcaaagaccagaggcaaaagactgcatagcttgtcttttttgcttggagaagatgctgaggtatatgcctcagtcactatggcagtcaggctgatacttcaattagagtggttagaacattggactggtgagaccaagatcagtcttttcatctccacccatccacctcagcaagcttcaatttctgatgactacattcctgtgacagacagctcccacaatcctcacctgccagctcacagatgtgggtttagtgtgtatcaccacacccttctgagtacaagggtgagagactgtggatgtttccgtgtatatccatgaccacaactgaaaaatgactctgagatggtcttctgataatgacttaatggcataatttctgtgtatatatatgaaaacttgttcttattttaatgactccaatagactttaaactcttaccgttatgtagcattttatcttgtgtgtatttttactgctctgctatagaaaggatatgacataaatatttaatcactctcagcagaattggccttatttcatggctccagattatctaacttcactgatctaatatttgtggcatggatgttgaagaatcataacttagagctcagttttttaggaagaattttataatggctataaatcgttttgccaagaggcagtttgtacaaaataatgactttaaaaatgagcaagctttttgatgatcataaaatgtgctgaatgtgctattttatacctgtttatttgtgaactcaatttttccattacattcttagtgtttatgcctcagattattcagtgcagacagatgggtgtggactgaagaacagttttgattttagcatatagtcatcattcatgtcccccaaagtctagatttttttaaaacaagtatcttaatttctctggatgacattaaaaggtaaattgtaatattttcaggctgaattatatgtctttgatggctatttttgtaatgagcatgtgctttaggtctttttttcctttagtcaactgcattcccactggaaccaatttggcatctgtgggagtcatagttttaatgtgtgctctgtccatccaccatttcctttggtacaaagaggaacataatgacattgaaatgcttctttcaaaatgtaagttgtaaacaaatctaatcaataaattattttcaagtaaattttgttcttatgaaatctccattagagttcccttcaccctaactctatattcatcacaagaaagtgccagaaggaaatttcaaatgaatgtctgcatttgtggagttttagaccttgcttattagaccacaagtagagtagacagcaacatgctattaacacattgaaatacaacttcaagccatatagcaaactgtgcattgctgggaaccaagccagcttcacattgctgcatggccatattgggcatttgcagagcaaatgtctgtagtggagagccatgacaacattctttttaaatagttgctttgtccgaagtcagaagacgtttttcatccacataccatgtaggaaggaatgctggtaataaattgatctgtttatctacacctgtaaatatagatggtacatctgtaaaacaagggacagtggtatacttaatgagttccctgtacattttcatctgttcagtctcggaattttagatacctggtgcatatgacttactgtttacaaaacctttaaaaactattttcaggtgccttgtcccctttgctttggtggtatatgataatctgtgcatttactttgttttctatgtggaagagaatgagattctgtaaactgtgatcaagtcttcaaagacaagttaaagttctcaaaaatattgttggaaataaaatttgtccctaagagataatatgatttttcctgtagctattgccaaatttatatctgaacctaataatatttacaatattttaaaatcagaaagcaagtaatttgacaaagatattataaaattgctatttaagatatttggctgttatttatgtttctacaaatgttcaggttttagatctttattgatgcacttatataccagaatgagtggctaatttaggatgaaagcacttattggaaggttttgaaatcagcagagaatatgattaaatctcaagtaccagtgatggtatacattttaattgattaaaaattgtattttactacagatgtaggaatttcttattctgaatttcttcagcaattaataaaacaactcacagaaaagatgctaatattgttatgttatattgtaaagaggttcattattattattatagtctctattattttataaatctggcagtgggatgttaggtcatttcatcccctttgagctagtactagattgttcccttcaatatattttccagtgtttcagccagtctgttaatccttcatactagagattcccaggatgttcgttgctggcagtagattcagctccaggaaaaatggcttctgctgccaaggaatgaaatgattcaagggttgtgcttgcaccactgttgtatagtttcctgacattcattccagattttcctttgcttattttcttggatatgtaagttttatactgtgtaaaattgtgtgtgtgcacgcatgctattttataaatttttagtttgcaaaaatttcccctggaaacttaatgcatatttaatgcatgtgaatgagctaatcaatgggattaacgatatctcaggaagtcttacattcagattatgttttaatcaatggtatttttaatgttactaatgaaaagaattgttggtcaccagtgacctccatattgccaaatccagtggacattttctgtctcgtttgtcctttcagttgtatttgacactggtaaccactccttcatcaagataacctcttcttggtttcctcatcttctttatggtttttttggccactcttcaaaattctgtaaaagtttatctagatttgaagtgatcttgtgatactttaaatgttggcatttctcaaagtcaccctgtcttagttcgggttgctataacaaaatagcatatactgggtagcttataaacaacagacatttacttcccacagatctggaatctgggaagtcctagatcaaggcgccgactgatttggtgtctagtgaggacctgcttactgacccaaagagggcagttttttctcttgtcttcccatggtggagagtggaagcaagctctctcggactcttgtaaggacactaatcccatacatgaaggctgtaccctcatgacctcacctaatcctaatgccttcccgaagaccccacctcctaataccatcaccttgggggctaggatttcaacatatacatttgtgggggacacaaacattcagactgtagcaaccccttctcttttctctctctactcttttcctaggtgattgtagccactcccatccttacaccgatgactcacaaacatacatttagctagccctatcctctggcttcagacctgcatgtccaatcagatgactaatgtcatcttttgggtttatcagagacatctcaaactcagcatgtcgaaaatggaaatcttgccctttcccagagtcttttgatcctctttctctgttgccgcctcattgaatgacaccaccatttatgcatgccagaaacctgagagtcaattttgacactccctgtcacctgccatattcaattcattaccaagtcttgtcagcaaccacccctcaaatccattcattctcctttatcatcgccttagtgcctactctactgcagtaactctttaacaggtctgatgtcaactcttgcttcatcagtctccaaccagccaatcatttcaaaatgcagatctcatcctgtgactcctctgctatatactcttcagatacttcccattgttcctagaatgaaggcataattccttggtgattttacctacctctgttcttccccaaggtcagctccttacacattgtcctttacttttgcataggagacatgtttccttccagtctcagtcctatgtctgcctttttcctttgcttgtaattattttcctgcttatctttagtcatcttgcagatcttggctgaatcgttacttttatgaggaaactttcccttacctatctattcaggcaaaatctcatctatttcaagtttcatctgtagtactttgttactcatttacatcaatttgattatttagtttgtccactcaagaatattaacaacacttcccttaatattagctgattcaaaacccatattcacattatgcctgattatctttgaaaaaaatatgtttattttgattagttcaaatcaggattcatacaggatcccacaccacatttgattagtcatgtgtcttagtttttttcagtcgagcagaggcaggtttttgtaaatgaagttttgttagaacacagccatgcccatttgtgtgcatcctatggctgctttctcacatcagttgcagagttaagtgattttaagtgagacaacacagactgcaactatttgctacccgacctaagtttaagaaaaaagttgtgcagtaccccttgcttgcttttcttttttaactattcaactcacatctttgactagttggtcaacaggtaagcagtcttacagaatatctcacatttcagatttgtttgtttgcatcttcctgtgtccttcaatttgttccctctcatcaatttctattgtaaactgaaaattaactctagatgatagatcatttagatggaattttttggcaaaaatacttaatacgtgttcctgtttatttcatattctatcatatcaggagatacataatgtctagttatcctggagatactaagattgattggtaggttcagatggtgatagctaatcctttcattctaaatgtcaccatcattctttcatgtgactttcatttgactaaacggttttattatatattgccaaacggcaaatttctagttaccatattatgtgcatatttgtgacatagagtttttctgtaaagaagaattttccttcatccactgtgtaatcatagttggaaagaggggagtaatgcttaacttcttccttttaatatttaattttcaaaactagagtttcatgcctttggtccctctagtagtaattgatacattttcattttttgtttatttattttattatgaacctctgttcatattgtccatatagattgtatgtttttgatcagtcgcagagcagttattctttttggtttctgattgtttcatttttggccattgggagatcccttatgttgcctcttatgtctttttgacaggactgcatttatctttgacagtttccttgcttccttccttgcttttaggccaacaagatgtctcaaactcatttgtattaaatacatttcttgtctcggacctagaagccacagcgttgttggtaggtgataggatgctcattattgaggagtctgtaattttttttaggtctcttcaatggacaaagctgaaaagatataaattcttgtaaagaaaaaagattatactcttagttctaattcaaattttagattatttaacagaaattctgatttgcttttttgaataacataaatataatgtttttctctttattctgttccgtgtatgtgtatatagttgtttcacaatattataactaattttaagtaagtgaatgaagtttaggatttttttgtgtgtgtttctatttgtccttagaatataacccactgagtatataatgtcatttctacattttaaagttattcaaaataatactttgtctagtttcttttttctttctttttttttataaaataacagtacttttatccaaatgaccaaataaaggttgctgcctgattctcaatttttttttaaattttattattattatagtttaagttttagggtacatgtgcacaatgtgcagcttagttacatatgtatacatgtgccatgctggtgtgctccacccattaactcgtcatttagcattaggtatatctcctaatgctatccctccctccttccccgaccccacaacagtccccagagtgtgatgttccccttcctgtgtccatgtgttctcattgttcaattcccacctatgagtgagaacatgcggtgtttggttttttgtccttgtgatagtttactgagaatgatgatttccagtttcatccgtgtccctacaaaggacatgaactcatcatcttttatggctgcatagtattccatggtgtatatgtgccacattttcttaatccagtctatcattgttggacatttggcttggttccaagtctttgctattgtgaatagtgctgcaataaacatacgtgtgcatgtgtctttatagcagcatgatttataatccttttgggtatatacccagtaatgggatgactgggtcaaatggtatttctagttctagatccctgaggaatcgccacaccgacttccacaatggttgaactagtttacactcccaccaacagtgtaaaagtgttcctatttctccacatcctctccagcacctgttgtttcctgacttttgaatgattgccattctaactggtgtgagatggtatctcattgtggttttgatttgcatttctctgatggccagtgatggtgagcattttttcatgtgttttttggctgcataaatgtcttcttttgagaagtgtctgttcatgttcttcacccactttttgatggggttgtttgtttttttcttgtaaatttgtttgagttctttgtagattccggatattagccctttgtcagatgagtaggttgcgaaaattttctcccattctctaggttgcctgttcactctgatggtagtttcttttgctgtgcagaagctctttagttgaattagatcccatttgtcaactttggcttttgttgccattgcttttggtgttttagacatgaagtccttgcccatgcctatgtcctgaatggtattgcctaggttttcttctagggtttttatggttttaggtcaaacgtttaagtctttaatccatcttgaattaatttttgtataagatgtaaggaagagatccagtttcagctttctccatatggctagccagttttcccagcaccatttattaaatagggaatcctttccccattgattgtttttctcaggtttgtcaacgatcagatagttgtagatatgcggcattatttctgagggctctgttctgttccattgatctatatctctgttttggtaccagtaccatgctgttttggttactgtagccttgtagtatagtttgaagtcaggtagcgtgatgcctccagctttgttcttttggcttaggattgacttggcaatgtgggctcttttttggttccatatgaactttaaagtagttttttccaattctgtgaagaaagtcattggtagcttgatggggatggcattgaatctgtaaattaccttgggcagtatggccattttcacgatattgattcttcctacccatgagcatggaatgttcttccatttgtttgtatcctcttttatttcattgagcagtggtttgtagttctccttgaagaggtccttcatgtcccttgtaagttggattcctagatattttattctctttgaagcaattgtgaatgggagttcactcatgatttggctctctgtttgtctgttattggtgtataagaaagcttgtgatttttgtacattgattttgtatcctgggactttgctgaagttgcttatcagcttaaggagattttgggctgagacaatggggttttctagatatacaatcatgtcatctgcaaacagggacaatttgacttcctctttttctaattgaataccctttatttccttctgcctaattgccctggccagaacttccaacactatgttgaataggagtggtgagagagggcatccctgtcttgtggcagttttcaaaggaaatgcttccagtttttgcccattcagtatgatattggctgtgggtttgtcatagatagctcttattattttgagatacgtcccatcaatacctaatttattgagagtttttagcatgaagtgttgttaaattttgtcaaaggccttttctgcatctattgagataatcatgtggtttttgtctttggctctgtttatatgctggattacatttattgatttgcatatattgaaccagccttgcatcctagggatgaagcccacttgatcatggtggataagctttttgatgtgctgctggattcagtttgccagtattttattgaggatttttgcatcaatgttcatcaaggatattggtctaaaattctcttttttggttgtgtctctgccaggctttggtatcaggatgatgctggcctcataaaatgagttagggagggttccctctttttctattgattggaatagtttctgaaggaatggtaccagttcctccttgtacctctggtagaatttggctgtgaatccatctggtcctggactctttttggttggtaagctattgattattgccacaatttcagatcctgttattggtctattcagagattcagcttcttcctggtttagtcttgggagggtgtatgtgtcgaggaatttatccatttcttctagattttctagtttatttgcgtagaggtgtttgtagtattctctgatggtagtttgtatttctgtgggatcggtggtgatgttccctttatcattttttattgcatctatttgattcttctctgttttcgtctttattagtcttgctagcggtctatcaattttgttgatcctttcaaaaaaccagctcctgaattcattaattttttgaagggttttttgtgtctctatttccttcagttctgctctgattttagttatttcttgccttctgctagcttttgaatgtgtttgctcttgcttctctagttcttttaattgtgatgttagggtgtcaattttggatctgtcctgctttctcttgtgggcatttagtgctataaatttccctctacacactgctttgaatgtgtcccagagattctggtatgttgtgtctttgttctcattggtttcaaagaacatctttttttctgccttcatttcattatatacccagtagtcattcaggagcaggttgttcagtttccatgtagttgagtggttttgagtgagtttcttaatcctgagttctagtttcattgcactgtggtctgagagacagtttgttataatttctgttcttttacatttgctgaggagagctctacttccaactatgtggtcaattttggaataggtgtggtgtggtgctgaaaaaaatgtatattctgttgatttggggtgcagagttctgtagatgtctattaggtccgcttggtgcagagctgagttcaattcctggatatccttgttaactttctgtttcgttgatctgtctaatgttgacagtggggtgttaaagtctcccattattattgtgtgggagtctaagtctctttgtaggtccctcaggacttgctttatgaatctgggtgctcctgtattgggtgcatatatatttaggatagttagctcttcttgttgaattgatccctttaccattatgtaatggccttctttctctcttttgacctttgttggtttaaagtctgttttatcagacactaggattgcaacccctgcctttttttgttttccatttgcttggtagatcttcctccatccttttattttgagcctatttgtgtctctgcacgtgagatgggtttcctgaatacagcacactgatgggtcttgaccgtttatccaatttgccagtctgtgtcttttaattggagcatttagtccatttacatttaaagttaatattgttatgtgtgaatttgatcctgtggttatgatgttagctggttatcttgctcgttagttgatgcaggttcttcccagcctcgacggtctttacaatttggcatgtttttgcagtgggtggtacggtttgttcctttccatgtttagtgcttccttcaggagctcttttagggcaggcctggtggtgagaaaatctctcagcatttgcttgtctgtaaaggattttatttctccttcacttatgaagcttagtttggctggatatgaaattctgggttgaaaattcttttctttaagaatgttgactattgtcccccactctcttctggcttgtggagtttctgccgagagatccgctgttagtctgatgggcttccctttgtgggtaacccggcctttctctctggctgcccttaacattttttccttcatttcaactttggtgaatctgacaattatgtgtcttggagttgctcttctcgaggagtatctttgtggcgttctctgtatttcctgaatctgaacgttggcctgccttgctagattggggaagttctcctggataatatcctgcagagtgttttccaacttggttccatcctccccgtcactttcaggtacaccaatcagacgtagatttggtcttttcacatagtcccatatttcttgaaggctttgttcgtttctttttattcttttttctctaaacttcccttctcacttcatttcattcatttcatcttgcatcactgataccctttcttccagttgatcgcattggctcctgaggcttctgcattcttcatgtagttctcgatccttggctttcagctccatcagctcctttaagcacttctctctattgattattctagttatacattcgtctaaatttttttcgaagtatttaacttctttgccttcggtttgaatttcctcctgtagctcggagtactttgattgtctgaagtcttcttctctccactcgtcaaagtcattctccgtccagctttgttccattgctggtgaggaactgcgttcctttggaggaggagaggcactctgctttttagagtttccagtttttttgctctgttttttccccatctttgtggttttatctacttttggtctttgatgatggtgatgtacagatgggtttttggtgtggatgtcctttctgtttgttagttttccttctaacagacaggaccctcagctgcaggtctgttggagtttgctagaggtccactccagaccctgtttgcctgggtatcagcagcggtagcttcagaactgcggattttcatgaaccacgaatgctgctgtctgatcgttcctctggaagttttgtctgaaaggagtacccggccgtgtgagatgtcagtctgcccctactggggggtgcctcccagttaggctgctcgggggtcaggggtcagggacccacttaaggaagcagtctgcccattctcagatctccagctgtgtgcttggagaaccactactctcttcaaagctgtcaaacagggacatttaagtctgcagaggttactgctgtctttttgtttgtctgtgccttgcccccagaggtggagcctacaaaggcaggcaggcctccttgagttgtggtgggctctacccagttcgagcttcccggctgctttatttacctaagaaagcctgggcaatggcgggcgcccctcccccagcctcgctgccaccttgcagtttgatctcagactgctgtgctagcagtcagtgagactccgtgggtgtaggaccctccgagccaggtgcgggatataatctcgtggtgcaccgttttttaagcccatcggaaaagcgcagtattagggtgagattgacccgattttccaggtgccatctgtcacccctttctttgactaggaaagggaactccctgaccccttgcgcttcccgagtgaggcaatgcctcgccctgcttcggctcccgcacggtgcgctgcacccactgtcctgcacccactgtctggcactccctagtgagatgaacccagtacctcagatggaaatgcagaaatcacccgtcttctgcgttgcttactctgggagctgtagaccggagctgttcctattcggccatcttggctgccagcttctttgtgtagtttcattaccacttgagatgcaattaaatttgttttagttttcagtttgagggaatttgtttttctttttagttcaactttagtttttgagtatgtataattttaagcagcattaatagagtataatcttttcaacactgcccaaaacatgacacatctagaataatctgtttacttctttttgccatattttaggaatggccagcccagtatcaagggtgggatgatacgagtggtttatcctggatctggatggcaataaggggatatattgtctatgtctgtaaagaatttcaaaactataataaaactaacaagattttgtctgggtttttattctcaccatgcaccagcaattctcaatactaccagtgagaaagtacttctccctccactgagtgtgttgctaagaagcttattaagcagtttgagtatccaaaggagagtaataagactgacgaggaatctgaaaaccatagcccatgagagatgaacagattttaatatcaatcagagaagaaaagatgaagaaattcacaatttcctcatctatttaaagactgtagtgtaaggaaataagttagactttgtgtactgaattccatgtttcattactgggtagaagttacagaacaaatggatttagcttattataaggagaagttttctaattgttagaatttacatatctgtggaatgaggctatttgtcaaactagagagttctttttcccttaaagatgtatagtaagagcagtgcgaacatctcacaagggatgttagatattcttctgtggatagatcttgcacatgatgacctcctgggctctcccagccctgtgattctgagatcacagtgcccatttcaggaatcctcactgtctagacccatccactaaaatgaatcatcatcttattcacatctaagccccattacaagtttattaatatcatccctttcagtggaaatgcgaaatattttattcagttatgctaatgtaattagctcataatgtcaaatgcttgagaagttgaggttgtagttctgctgggtatttgtttctcatgtcaaatatcataccatcagtgaaattgttcataaccaccaaaattaacaattagccccttcagcccctcttccacctttatcatatttatttgcttaacaaatttatctttttttttttttttactcattgattctgaatctccctctatttaaatgtatattctgtgacagcagtcctcaacctttgttgcaccaaggaccagttttgtggaagtcagtttttccacggacaggggcagaacaggggatggttttgggatgaaaccgttccacttcagatcagatcatcaggcattagattctcatgaggagcatacaacctcaattcctcgcatgtgcagttcataatagggttcgtcttcctatgagaatctaatgccaccactgatctgacaggaggcggagctcaggtggtaatgcaagcagtggggagtggctctgaatacagatgaagctttgctcattcaactgccactcacctactgctatgtagcccagttcctaacaggcttcagaatgggggatgggaaccctggttctatgagagcagaatccatgtatctttttgtaccactgaatcccaagcatttcgtgttggtacatttttctgtaagggaatccgtgtcttttgttggcttttaaaatggccacctaaaaaaatttaggaactactataagagtaatgttgtcaaaatcaaataccactgttgagattttgaatctgtgaaggataattgcattcttaatattttgtcttcccttccaaaatcatgctagttagtatttcttcatttattcaagatttcttttatgccaaatagtaaattttggtaattttctttatataggccataaacatgtattattaatttaatttcttggtattttttaatctactaatgggtctactaatgagctttctcaaaggaaggaaaggagggaagaagaagggacattggaaaaggatatacagaatatttttatcagtctaggtaaaggttaacttgcctctggtaatctcatttttttaagttctttaagcatatagataattaagaaaataaattggctaggcactgtggctcgtgcctgtaatcccatcactttgggaggctgaagtgggtggattgcctgaggtcaggatttcaagaccagcttgaccaatatggggaaaccccatctctactaaaaatacaaaagttagctgggcatggtggcatgcgcctgtagtcccagctattcaggaggctgagacaggagaattgcttgaacccggtagaattgcttgaacccgggaggcggaggttgcagtgagccgagatcatgccattgcactccagtctaggcaacagggcgaaactccatctccaaaaaaaaaaaaaaaaagttagaaaaagttcctatggaaatgtgttataattttattattaaagtactgaaaaatacattattagaaaacttcaccttggaatcttttttaagcattactcttttgcttgtggtttttgtcatcttttacagacttgaatgttgttctaggacagaatattgttgtactttattttagtgaagcataaccatatcaaataacatttcagaactatacattgcacaatcttggacattttcttgtaagaaggcactaaggaaattttatttttgtgaaagtaattcttaagtaacagtgactgttttttatgggctagctccagaccacatttgcctccttcccatgatcttgtttttctgatgtcccaagctgtaagtatagaggtcagaatgacattttagggctctaggtttgaatctcataatcttaaaatggatattattcagtttatcaaaaagatcagttctattttttttttcagattaaaaataaattaggccagacatggtggcttatttctgtaatctcaacactttggaaggccagggtggatggatcacttgagcccaagaatttaagaccagactgggcaatatagtgagaccctgcctctaataaaaattttaaaaattagctgagtgtggtggcacacacttgtggttccagctatttgggaggctgaggtaagaggatcacttgcctaggtagtttaggctgcagtgagctatgattgtggcactgtactccagcctgggtgacagaatgagactgtctcaaaaaaaaaaaattagttttaccaaaaatagtgcaaataattttcatttacctttaactcacattcccaaatgttaaaattttaccacatttgctttactattgtgtttgtctcttttttttgaaatggttgagaataagtttacagacatgatgtcccattgctaagtactacatggtgtatttcttaaaaataaggatatttttcaaaatcaggaaattaacattgataaaaactattttaagtaaaaaatgccttttttctcctccaagtcaggaatctaataccaaaatcatgttacatatagttgtcttctttcatcttttttaatctggaatggtccctcagtctttctttgtcttttatggcctttaaaatttggagaatacagaacagttttttgtttatttgtagaatgtccctcaattttggtttgcttgattttttgggaattagattttggctatgctgtgatcatatcaggagccacatgacatctacttgttccattactgatgttaatgttaactgtgatcccttgtttaaagtgctggtgatacacatttttcaagaatatgtttcttgtattttaagtttttgctctcttttggtagatggagtcctagaatcctttccaagactcaatagaaatatctctttaaatataagcctactttaaaagatttttaactactctgttttggagattaacagcttcttaagactttctctatttcagaggaattttgttttgtctaataatctgtctcctgctctaggttgtaagctccctaagggtagagattgtgtgtacatcattccccaccctgtcttcaatgcccagcactattcccacatgcagtagatagtagttactgcttgactgattggttgtttgataggctggtggttgaatggatgaatggattgttcgtttgtggaaatttgcccatttcaaatcttctaacttactagttttgagttcaacatactttaaaaattacctatcaccctcttggtattaatactttgatatagttttgatgtagttcttcagacatgattctcaaggactaataatagccaagacatatcagatatgttcactattgtgttgattcaccttgtcagattgattttacattctcttctctctagcttgctatttttaaatggcctgaaatgtggcgtcagtgaaattactctgacaataatagtaataattcttattggtcctcttattactttattttttgtaatatcactttaaaatcttggagcggtttaaaattttttactatgttgttcgcttatgggtttgaggcttagagagatcatacacccactattataaagctgccaatgggtgagcaggatttagatttctaagttttgtctttctttaaaaaattttatttttgcaagcacttttccaaaggatttctaagttttctgactcctaattcagtgttctctctaccataatctcttccatattgtagtagtattattgcctacttgccaggaacatattcctaataccgtgaagaaaaagtattttgtatcactttgttctaccaaggcgtattttatgtggttcactaatgacagcctcatattttgagacttttctcccagtgagtatgccttttctcccctaaatagactttttaaagagcagttttaggttcacagcaaaagtgatcagaaagtatagagttgccatatatcccctggcctccaacctcccccactatcaacatcctgtgccagagtgacatatttgttatagttgatgaaactgcattgacacataatcatccaaactacatagtttacattagggttcactcttggtgttgtatattctttggtttttgacaaatgtatgtatccaccattatagtattaatacagtagcttcactgtcctaaaaatcctctatgctttgtatattcatccctctctcccctctaactcctggcaacccctaatctttttgctgtctccatagtttttccttttccagaatgtcatataaatggaatcacacaatatgtagcctttgcagattggtggctttcacttagtaatttaggttcctccatgtcttttcatgacttcatagctcatttttttagccctaaataataatccatcgtctagatgtaccaccgtttatttatttattcatctactaaagaataccttggttgctttcaagtttgggcagttatgaataaagctgccataaacacctgtgtgcagatttttgtgtggatataagttttcaactcttttggataaattctaaagagcacaatttctggattgtatggtaagagtatatttagttttataagaaactgccgaactgcattccaaagtagctttaccattgtgcatttccaccagcagtgaatgagagttcctgttgctccacatcctcgcctgcatttggtgtaatccatgctctggatttgggccattcaaatagtctgtggtggtgtctcattgtttgaatttgcattttcctagtgatgtatgatgttaaacatctctccatatgcttatttgccatctgtatatcttctctgatgaagtgtctgtttagattttttgcccattttttattctgattgttcattttcttttttaactttttattctgacagtttttttttttcttgggcaccatctagtgaagatacacagaaagctttgaggacataaaaaatgatttattttttcaaaggaaaactcctctctttctgtttctctccttttacctttgtctttcagttatacctgccgccacttgcggagatatgtttatgtgttggacaaactgtatttcccccactctcactgttctacgcttcagcattgcttctcgaccctcagtgacaatggagaggaactcttgtctttaacttgctctcacattctcagatcctatgcttccaggttattaacctctgctgtccatttactgcatgctgcatgttgtatatgactgacaattgcatgttttaataagacatgtgtcaattaaattattaaagagaacatttatatttgaaatggtactaaataatttttttaaaataatagctggattttgtttccttacaaatgtcttcttaagtaatttatattatgtttcacgggagagaggaaagctttcaaccacagagttgtctatataaacttgccagaactattctataccgcattccatttgggaatcttttgatttatagtagttggagtgctctgatgttttatatgaaatagactctacagttactatgacctttgagttctccttcatgcaagcacacctgagagctagctgtaggatttcacctatgttccgatagaggtgcattcagttgagcaggttgattttataggaaggcagaaattatactattggggttttgtattttgtactcattttatttacatacagagtggctataaaatcatataaaatcagcaggttgcaatgtgtcatggatgaatgtagattaaacataatgggggtcggtggagtaagaaagagacaagctgtcaatctcgaatatcagagaaaatcaacacctgctgttttgtgtttatcgtgcaccaaaatagaggggcagtatgacattaccactttgtgctttgcagttaacatttttaacacgtttttttttttctaagtaagagatgacttataccagcactatactgttagctagatatggtgatttaaggcaataacttcactgccagatgatttagatgaagaaggagaaaactccatgacaaccttaaccagaaattagcaaacatttagaatttaaaatagaccttttcagatgatgaaacatataaaacttgagactatacataatatctaagtgaaaatacttgattgctaggaaaggaaagcagtctggtgtgtaagttgacagagacttttcttggaagcagaaagattttatagactcgtgatgatgttgatcagcctcacatcgagtcaatgtagatacttttgagaaataaaaaactgagggttagaaaagtaggtgaaaataatagaattaactgttacgtatgtaatgttagaagaatttatcaaatttagcagactaaacccagtgactttccactggcttatggaaagtgagggaatatcaggtaagttgcatgatactctcaggaattggagacagagtgtgtctggtttcaaggaatgaggagaactgctgctgatcattgaacttctgaaatgtgcaggataattgacgtctttttctttttaattttttttttttttttttttttgagatggagtcttgctctgtcacccaggctaggctgcagtgactcaatctctgctcactgcaacctctgcctccctggcccaagcagttctcccacctcagcctcccgagtagctgggattacaggtgtgcaccaccacgcctggctaatttttatatttttagaagagacagtgtttcaccatgttggccaggctagtcttgaactcctgacctcaagtgatctgccctcctcggcctcccaaagtgttggaattacaggtgtgagccactacacccggtcgaccttactcttatttactagtgtatcatcggactctccacaaaaccaataggagattttatatgtaagtggagagagagagagatggagacagagctattttgggctttggctattgcaggggcttgcaagtctgaaatctgtagggcaggttggcagcctggaaattcaggtaagccttgatattgcagtctcaaattctaaatgcacagggcaggccgtcagacaagtgactcaggcaggatttttatgctgtggtcttcagacagaattccttcttcctcaggaaacctcagtctttataatagcttcagctgattgggtgagtcctattcatgttataaaaggtactctgctttccttaacattccataaatgttaatcacatctgcaaataccttcacagcaacatctagactagtgtttgacccaacaactgggcacaatagtttagccaggtttacacataaaacatcatcacactatgcttctcttctgtgttctttgttaccacgtatctgttccatgtgtttttctttgtatatatcctatcctgtcatatctctcctatggttttgtggaaactataagccttctgggggtaaacactatatcttgttcattgttatacatcgtatagcatatcatgcctggcgcattgttaaccctcattaatacagctggcagcagattttagcattcgtcatgtgtgccagaggcccctgtcttttttctcctggagtcacactcctcacctagcaggagcagacaggagacagaaatacatgttcagctgggaaaataaaagaaaatgaaagaaaaaggagaaggaagacaaagtagggaaaaacaaaagtttaaaaatgaggagaaagatggagacaccatgtggtgaaagcagtgtccaattcctgagcctccttcccctgatgcccagcagagttcagccaacactcagtttctgagtcagtgtagaatttattctgcattttctgtttcctctttcaacacctttcctggaaccccctccttccttacccacttgggtttctcagtactctcagctggggtttacagtatgaagcctccagggggtattttttcaatatcaagccctcctgaggccctgcccatttttttctgaacaacagagaagaaatacagtgttaatatagtgtagtggctaggggcatgggctctggagttaaggcttcctccccatacccccaaccaactttcactccttgccttaccacttgcagtctgggacaggacagaggacactgttctattcaggacagacctgaatagatttgcataaaaggaattacctcgccatcttctcttgccgtgttcctttgcaggtgacaaacattttgcatacacagtgacacatggccaggtggagtgtagtccctgcaggtgagagattttcttcaacagaactacattatatagagagacaaaccaagccaaatatctgaatggagcaatcatggacttacttaacaaaatcaaatagctttctgttatgcggaatttaaaaatgtaactcagtttctagagagaaatataagcttatttcttaaaaaagaactttaccagctgggcgcggtggctaatgcctgtaataccagcactttgggaggccaagatgggcagatcataaggtcaggagatcgagaccatcctggctaacacagtgaaaccctgtctctactaaaaatacaaaaaattagccaggagtggtggcacacgcttgtagtcccagctactcaggagtctgaggcaggagaatcgcttgagcctgggagacggaggttgcagtgagccgagattgtgccactgcactccagcctgggtgacacagagcaagactccgcaaaaaacaaaaaaaaaaaaacaaaaaaaaaactctaccttagtcaaacatgacttactgctatagatagaagtcttactccactgcaaacttcttccaaatgtaagaattcgtttcacagcaaccctgaaagagagcacttctgtgtgctgcttacctcagaaggcagtaaagctcttgctgtttcatttttagaaagattagaatatgttaagcctgcctaccaataatttttgtatattggctatagctctgtgctttagagaaacacataaatgtgtaaactgtgctgtctatgaggtccccttgggtttttgaaaacacctgtcattgactccccttaatttttgttctcttcagcttaaataccttggccacttaaaccattcctgacagccgatgatttttagattatgcagtctttttattatcttcttggatgattgatagtacccatcataaaatttgatatccagaatttgatataatatttcagtatattttataatttaaaaatatgaattataaaattatagttatgttatatgtatttttttctcatctactatggcaatctgtaataaattatactcttaatttgtcctaagactggagtgatttttaaaagcaggcacaccttgactcatatagaattaccagatctttttcacacaaaaacacatttctctagatttgtatatttaattatttgaatgtgattgcagggctttacatttgttcttatttaaatgtaatgtattgaggccagtcacagtgactcacgcctgtaatcttagcagtttgggaggctgaggcaggtggatcacctgaggacaggatttcaagaccagcctggccaacatggtgaaaccctgtctctactaaaaatacaaaaaattagctgggtgtagtggtacatgcctgtagtcccagctacttgggaggctgaggcaggagaatcgcttgaacccaggaggcagaggttgcagtaagccgagatcacgccactgcactccagcctgagcaacagagtgagactctgtctcaagaaataaataaacaaataaatatatgtaatgtattgaatttatcttgttctgagtcacattttatgaagccataagcctttcagacctgttagctcctccattttacccccagaagcattgaaatcagctctcaaactaccaaccttggatttgacttctctagaaatcaaatttagaattttgagtaagcgcttgagaatttcaattcattgctaggcttttttagtttgtgtgtgcacttcagtagcgagttgaggtttacttagtgcttttgacaatgattgtgatatggtcaaagcatgctgcttctgatgactgtcatgcatttaagtgaatctgagaggaaagaatctgactttaggtaacagaccaatactgcttagagttccacgtccaattttaagttctaatttcttaggtttcagggtggagtagtgaataagtttggtgagaaatctgtgaagtaagaaagtacctatttgtctttatttttacttcacatactttgctgatgtcaaaaatatagctgctactattgttttaattaggcctgaggcaaggaaaaatgaagggctaagtttagtgttgagttaattctgttgcagtggcacagtttattttgagttactattaactcggctcttcagattgttgctgcttgatgagagaaagctgaaaagagcatcagaaatgtttaaaaattattttctaacacacattgagttaaaaacattatattctctttttataaagtaaagcatgttaacactgaagtccttgactagttaatactttgccaggatcagtggttcctgaccttttggggttcatataactcttctacaatctattaaaaattatagaccctctcttcaaaaaccagaaataggagtggacctgatttaggcttacatggacctgatttaggtagagttttagatataggtgctgtgtaaaagagagactcccctgcccaaataatagtggcttaaagaagcaaatggaagtttacttctcaagtaaaagtatgagctaatgtggcagctctgccccatagaattttcaagacccagagttcctttttttttttttttttttttttttcacttttttaaatttatttttttattgataattcttgggtgtttctcacagagggggatttggcagggtcatgggacaatagtggagggaaggtcagcagataaacaagtgaacaaaggtctctggttttcctaggcagaggaccctgcggccttccgcagtgtttgtgtccctgattacttgagattagggattggtgatgactcttaacgagcatgctgccttcaagcatctgtttaacaaagcacatcttgcaccgcccttaaaccatttaaccctgagtggacacagcacatgtttcagagagcacagggttgggggtaaggtcacagatcaacaggatcccaaggcagaggaatttttcttagtgcagaacaaaatgaaaagtctcccatgtctacttctttcacacagacacggcaaccatccgatttctcaatcttttccccacctttcccgcctttctattccacaaagccgccattgtcatcctggcccgttctcaatgagctgttgggcacacctcccagacggggtggtggccgggcagaggggctcctcacttcccagtaggggcggccgggcagaggcgcccctcacctcccggacggggcggctggccgggcaggggggctgaccccccccacctccctcccagacggggtggctggccgggcggggggctgaccccccaacctccctcccggacggggcggctggnnnnnnnnnnnnnnnnnnnnnnnnnnnnnnnnnnnnnnnnnnnnnnnnnnnnnnnnnnnnnnnnnnnnnnnnnnnnnnnnnnnnnnnnnnnnnnnnnnnnnnnnnnnnnnnnnnnnnnnnnnnnnnnnnnnnnnnnnnnnnnnnnnnnnnnnnnnnnnnnnnnnnnnnnnnnnnnnnnnnnnnnnnnnnnnnnnnnnnnnnnnnnnnnnnnnnnnnnnnnnnnnnnnnnnnnnnnnnnnnnnnnnnnnnnnnnnnnnnnnnnnnnnnnnnnnnnnnnnnnnnnnnnnnnnnnnnnnnnnnnnnnnnnnnnnnnnnnnnnnnnnnnnnnnnnnnnnnnnnnnnnnnnnnnnnnnnnnnnnnnnnnnnnnnnnnnnnnnnnnnnnnnnnnnnnnnnnnnnnnnnnnnnnnnnnnnnnnnnnnnnnnnnnnnnnnnnnnnnnnnnnnnnnnnnnnnnnnnnnnnnnnnnnnnnnnnnnnnnnnnnnnnnnnnnnnnnnnnnnnnnnnnnnnnnnnnnnnnnnnnnnnnnnnnnnnnnnnnnnnnnnnnnnnnnnnnnnnnnnnnnnnnnnnnnnnnnnnnnnnnnnnnnnnnnnnnnnnnnnnnnnnnnnnnnnnnnnnnnnnnnnnnnnnnnnnnnnnnnnnnnnnnnnnnnnnnnnnnnnnnnnnnnnnnnnnnnnnnnnnnnnnnnnnnnnnnnnnnnnnnnnnnnnnnnnnnnnnnnnnnnnnnnnnnnnnnnnnnnnnnnnnnnnnnnnnnnnnnnnnnnnnnnnnnnnnnnnnnnnnnnnnnnnnnnnnnnnnnnnnnnnnnnnnnnnnnnnnnnnnnnnnnnnnnnnnnnnnnnnnnnnnnnnnnnnnnnnnnnnnnnnnnnnnnnnnnnnnnnnnnnnnnnnnnnnnnnnnnnnnnnnnnnnnnnnnnnnnnnnnnnnnnnnnnnnnnnnnnnnnnnnnnnnnnnnnnnnnnnnnnnnnnnnnnnnnnnnnnnnnnnnnnnnnnnnnnnnnnnnnnnnnnnnnnnnnnnnnnnnnnnnnnnnnnnnnnnnnnnnnnnnnnnnnnnnnnnnnnnnnnnnnnnnnnnnnnnnnnnnnnnnnnnnnnnnnnnnnnnnnnnnnnnnnnnnnnnnnnnnnnnnnnnnnnnnnnnnnnnnnnnnnnnnnnnnnnnnnnnnnnnnnnnnnnnnnnnnnnnnnnnnnnnnnnnnnnnnnnnnnnnnnnnnnnnnnnnnnnnnnnnnnnnnnnnnnnnnnnnnnnnnnnnnnnnnnnnnnnnnnnnnnnnnnnnnnnnnnnnnnnnnnnnnnnnnnnnnnnnnnnnnnnnnnnnnnnnnnnnnnnnnnnnnnnnnnnnnnnnnnnnnnnnnnnnnnnnnnnnnnnnnnnnnnnnnnnnnnnnnnnnnnnnnnnnnnnnnnnnnnnnnnnnnnnnnnnnnnnnnnnnnnnnnnnnnnnnnnnnnnnnnnnnnnnnnnnnnnnnnnnnnnnnnnnnnnnnnnnnnnnnnnnnnnnnnnnnnnnnnnnnnnnnnnnnnnnnnnnnnnnnnnnnnnnnnnnnnnnnnnnnnnnnnnnnnnnnnnnnnnnnnnnnnnnnnnnnnnnnnnnnnnnnnnnnnnnnnnnnnnnnnnnnnnnnnnnnnnnnnnnnnnnnnnnnnnnnnnnnnnnnnnnnnnnnnnnnnnnnnnnnnnnnnnnnnnnnnncggggggctgaccccccccaacctccctctcggacggggtggctgccgggcggagacgctcctcacttcccagatggggtggctgccgggcggagaggctcctcacttctcagacggggcagctgccgggtggaggggctcctcacttctcagacggggtggttgccaggcagagggtctcctcacttctcagacggggcggccgggcatagacgctcctcacctcccagacggggtctcggccgggcagaggcgctcctcacatcccagatggggcggcggggcagaggcgctccccacatctcagacaatgggcggccgggcagagacgctcctcacttcctagatgtgatggcggctgggaagaggcgctcctcacttcctagatgggatggcggccgggcggagacgctcctcactttccagactgggcagccaggcagaggggctcctcacatcccagacgatgggcggccaggcagagacactcctcacttcccagacggggtggcggccgggcagaggctgcaatctcggcactttgggaggccaaggcaggcggctgggaggtgtaggttgtagtgagccgagatcacgccactgcactcccccagagttcttttctgttgtgttccaccaccccctgtgtgttgctctgaccaaaaggtcgcgaatggctcaccacaagctctgcatttcagatagtagaagagtgaaagggactagggttggatgtacatttccattttaagggcatcacacatccctttggccaaaagtttgtcataggactacccaacgtgcgtggtgagctggaaagaaagttttcggctaagtgaccctgtggcctgctaagtattctgctgttgggtaagaagggaagatggttatggggacaactaacagtctctgccatacaatagagagttcctgtcctgactaattaacaaatgcttattcagtgattaccgtgtgattagtcctgtgccaaacagcaaatggggttcatggtgaagacagaaaaataataccattgggaaaaaatcattaccttgtactgttagttaaatataaaattagtaacatataaaaagcgatctcttctgacaggagaatctgaagtagtctgaaacaggattatctgcgcagtaactaagaatagataatgtgctattagcagagtaggcatggaaaactcaagtccagaagttcacatatagaagagcacatgacatatgctaaggcagtaataggatgtttggcaaaaacagatttatctgtgatattaatcagtattgcaacgagttacattctccagggccagactctcgagggccttgaatgctaggccaggccatttcatgtattttatttgttctggctttttttgtgtatgattttggtagcccattgagttttacttggtgcttttgagcctgactgatgtggtcgaagcatgctgcgtctgatgactgtcatgcatttaaatgaacctgaggtgaaagaatctgaatttaggtaatagaccaacacatagactacctgattgtggcagtagagatggaaaaagaaggacttaatggaggtgaactttgaaaaaaaaaggaattgaagtatgatattgagagaacataattcaacattgaaatggtgtagtatgaaatattagcaggaactgtgttattacttctgtgcatgtagttagttcctatcaacatggcaaatatttagtatgtatcatttgtgtggtttatattttatactgtaagaggagtgtgctaggggtattcttattaccgatactcatattaaaagctttgtgtaatcagttggtaaaagaatgattttttaagagtgaagattttttgaactgtccaaccatttaaaaatttgttatactaaagatatagcataatacgtgattctggattattttccagccatacaatgcaatacaaagaatggcgattcaagagatctgtttcacaacatggtgattattgttaataacaatgtattgtatacatgaaaattgctaagagagtagatctttaagtgttcttaccacaaagaagtatgtgaagcaattaatatgttaatttgcctgatttaatcatttccacaatgtatacatatatcaaaacatcatttacatcataaatatatataatttttgtcaattaaaaaatttagtaatgaagatagtggattctataaagaaatatgctagaagtatttaccaaaagtcattaaaatgttaatatattggaatttatcttaagggaagaacttaacctaaagaaagggttatatttaggaacaaaatagaagaatggtcaaataaactatatcctatcaactcaatggaatatcatacagccattaaaatattataaagaaaaataagtagaaatatggaaaacatttgacataatgtttatgaaaaaagaatataagcttctatactgctattttctatttttagtagttatatttgatataatgtttaatgaaaaaaatataaaattatatactgctattaaaacaactacataaaaattatgtatgtgtccaaaaaccagataatgtataaaaatagctgtggaacaatagtaaaatgtacatgacatttctttttaaaattatttaaaatttatcttttacaaattaaaaaaattatgcaaatttaaataaattttttctctcacttttctctaccctcctcccaaccacccctaagttacatgtatgtctttggattttctttccttttttccctctactaacataatgcaatgccactttattaataggcaaagaactgcggtggtttacaggattagataggagttcctcagtatgatcacagagaatttctcccatggtttattttagaactttcatagatttgctttttttcttctttttttttcttttctttttaactgaatggatttataattctaagtacgtgtaatatgaaatcatttttatatctcaactgtagcactttcaaatttaggaatacttttacccatttgtcatgtcttttatactgtgctttaaaaaaaatcacatctggtgccattttattactttcaaaggattgcatcttcagtctaaatctaagacaaagctctaatgagtttcctcaaaacaagttttaaaaattgctggaatggtcttgtcatataatatgctattcacttaatctgtaatgaataaatacttgaagctatagtaataatttttcatgcatatgatactgtcgtaataattctgttgtggctgtgctttattgatttctgtgccacttctgtggcatgaaatgaaatgtattatcccacttaaaccattatggtttccttttgaattacatattcattacttgatcctgtcatcaagcctattctattttccataatgtggtattcagtcttaaagatttacagcgttagtcagtgcagtataagtcaaaataggacaagtaaattcagatcagaaaagttggtaagaaaatgtaatagataaatttttttatttaattatactttaagttttagggtacatgggcacaacgtgcaggtttgttacatatgtatacatgtgccatgttggtgtgctgcacccattaacttgtcatttacattaggtatatctcctaatgctatccctcctttctccccccaccccacaacaggccctggtgtgtgatgttccccttcctgtgtccaagtgttctcattgttcatttcccacctatgagtgagaacatgtggtgtttggttttttgtccttgtgatagtttgctgagagtgatggtttccagcttcatccatgtccctacaaaggacattaactcatccttttttatggccacatagtattccatggtgtatatgtgccacattttcttaatccagtctatcattgttggacatttggcttggttccaagtctttgctattgtgaatagtgctgcaataaacatacgtgtgcatgtgtctttatagcagcatcatttataatcctttgggtatatacccagtaatgggatggctgggtcaaatggtatttctagttctagatccctgaggaatcgccacaccgacttccacaatggttaaactagtttacagtcccaccaacagtgtaaaagtgttcctatttctccacatcctctccagcacctgttgtttcctgactttttaatgattgccattctaactggtgtgagatggtatctcattgtggttttgatttgcatttctctgatggccagtgatgatgagcattttttcatgtgtcttttggctgcataaatgtcttcttttgagaagtgtctgttcatgttcttcacccactttttgatggggttgtttttttcttgtaaatttgtttgagttctttgtagattttggatattagccccttgtcagatgggtagatggcaaaaattttctcccattctgtaggttgcctgttcactctgatggtagtttcttttgctgtgcagaagctctttagttgaattagatcccatttgtcaattttggcttttgttgccattgtttttggtgttttagacatgaagtccttgcccatgcctatgtcctgaatggtattgcctaggttttcttctagggtttttatggttttaggtctaacatctaagtctttaatccatcttgaattaatttttgtataaggtgtaaggaagggatccagtttcagttttctccatatggctagccagttttcccagcaccatttattaaatagggaatcctttccccatttcttgtttttgtcaggtttgtcaaagatcagatggttgtagatgtgtggcactatttctgagggctctgttctgttccattggtctatatctctgttttggtaccagtaccatgctgttttggttactgtagccttgtagtacagtttgaagtcaagtagcgtgatgcctccagctttgttctcttggcttaggattgacttggcgatgcgggctcttttttggttccatatgaactttaaagtagttttttccaattctgtgaagaaggtcattggtagcttgatggggatggcattgaatctttaaattaccttgggcagtatggccagtttcatgatattgattcttcctacccatgagcatggaatattctcccatttgtttgtatcctcttttatttcattgagcagtggtttgtagttctccttgaagaggtccttcacgtcccttgtaagttggattcctaggtattttactctctttgaagcaattgtgaatgggagttcactcatgatttggctataatagataaatttttaaaaattgttcttctaacttagtatgtttctggtttggggtttttctttttttcaagaaccatgggagtgaattgtttacatgcattctaggggagagtagaaggcacattttgagaaacttcaccgccttctttacttgacctcaacagatgaactaggtagtacagccccaccctcttttggcttctgtgacagcatactcctggctttcttcccccccttttgccattttttttatgctttttggttttaaacattagaacttttaaaaagcttgttcctaaagcccttttctgtacttaaactcttaccttagccattttcatcaatttctatgactttacatgacatccacatgccaatatgttccaaattgatagtccagctgaaactctgagcccttgtcctgtcctgagagctgccttactgttaacatcaacactcatacctcacatgtcccatctcccaagagaactcttaagctttctccataaaccttttcatctccatgaatggtgcctgtatccgtcaagttgcttctgcccaccatctaagagtcatcagcattttcccctcacctgctgtattcatcctcactacatccatttcagttctctatccaaaatataaatcaaatctgtacttttttttctctgttaccactgccagtcaccctagctcagacagtccttatcacacacctggactcctacctagtccttttcctcaagttctgtcaccccaccctcacccctaattcccgatccagcaagcatcttcatagattctaagttacatgtatcttccttgctcaaccctttagtgacttttctttgcccttaggatgctacattctctagccatatcaattgtgctttctcttccaggagttgctcaccccttttctatctcaggactttttgcatgttctttcctgtctttttccttctccatattttcttacatttttcacttcctcagacaagttttcctttatccaaaacattgttatgttaatattatggttcctctcacacaccacccctcgcactctctcacttttgctgtcactctcactctaagagtagatcattagttccataagggcagaaaatgtgtgtgtgtgtgtgtgtgtgtgtaaccactgatccctagcacttaatatgatacttgggtattcaataggtgcttcatatttgctgagaatgggtaattttgttttgctgaaatgaacttaactttttgcagacttgctcagtctactaatgaccacttttcaatagacttagagaagcagtaaagtgtgatcctgttataaagctactgtgtcttaaaagtagcattcaaggccgggtgcagtgcagtggctcacacctgtaatcccagcactttggaaggccaaggcgggtggatcacctgaggttaggagttccagaccagcctggccaacatggcgaaaccccatctctactaaaaatacaaaacattagccgggtgtggtggtgggtgcctgtgatcccagctactcgggaggctgaggcaggagaattcgcttgaacccgggaggtgaaggttgcagtgagccgagatcgcaccactgcactccaagttgggcaacagagtgaggctccatctcaaaaaaaaaaaaaaaaaaaaaaaaagatggtagcattcaagagagcataattagataatgaagtatttggttgtagttctctggttttagtttctacccacgtacagtaaaactacctgactaaacgaaggctccctaagtcttcttgaatttgtggaattgcattgcttttcctcccagtgaaagaatttacaaattttccacttgttgaaattatctgataaccatgaccatcaaggcagtatcaacatgctttgaaacatccctcctaaaaacacaaaactttttcttgtggttgtatctatagtgttgagtgggtagggtgctttggcttcaattctgggtagaagcagtagtgtagattctgttatgatttcctcagctaggaggggaggatagggagaggctggttaatgaatacaaaattatagctagctagaaagagtgagttctgttgttctgtggtactgaagggtaaatatggttaactataatttattgtatattctcaaaaaactagaagagagaattttgaatgttcacaacacaaggaaatgatgaatatttgaggtgatggctatcctaattactttgatttgatcattacctgttgtatacacacatagaggtatcactctgaatcgcataaatatgtacagttataatgcatcaactaaaaaggagaaaacttaattttaaagtaacacgatactttgagtagacagtgaactgaactaacaattacatcttgttaggtaagaataaagtgttgggaaaatatatacatatatgaccattaattaaataaaagcatgaaaaaaatcataaagtaacatttactctgctagcttcagctaagcagaagagcacagaagggaaagcaaaattattttacattaaattttgcctcttgacatttaaacacaaaattggaaaaatttgaaaatagagtagtcctagcaagctttaccatcaccactcactcccccaaaaagttttcctttggcataagtaaattatggaggctaatgactgcaatagtagtaacagagtgaagtttcaggaatataggtaaaacataagaaaatacatatttgtgtatattaaaaataccatttaactttttaattcaaaatgacttagcagaaaatcaaataaatttgtactataactggaaatatttttaaaatatttttttgtgttacttatgagagtattgttaagatttattgaagactaacagtaacattaaaaccccacccagaataaattttagattactagcctgccacagtgatctacactaaaatgtcaccaaattgtagtatcattcaaaaatggaagaaattaagtcagtgactaaaaatataacaaaaatacttattaactaactggatttttaatctgtaagaaggatgtcatgagaattttggcatatggaaacaatgtaagaataggaccttaggaaagaacgatatgaaattcatatttgatccaaaaaatggtagtagatccttttttcccaccagatgctcctaggtgtagattgcattggtgaaggaggcactctagtctcagttgatgtcgagtgtgtaggtgtgggtgtgtaggtgtgaccagaattcctgaatatggacatgctaaataacaaattaaaatttctcgtgcagtttaaactatgtgtatggaggatttggattggatacaaaattcctcaagttggatgctcttcctctgggctgccatttgcagggaatttcatgtacatattcagacatgcagacttgcacaactgcttattatagaaatattctttgttactaagtgtctaacagacttaaacatacagggtttccgtatatggagaaaagtgattccacccactccatgccctggcacgtcatgatgccagcccttagatttatttggcttccagaatttaaatagacagtgatgtaaatcagaagttagtgtttcacctactggcactaagtaactaaatcatcacattggtgatgaggaaggtaaatccttttcagtttggctacagaatggaaataacatttattacaatatgatctaagttatattgacaacagaatgatttatttctatgttataaaagatgaagaaggagaggagaatacagagaagttaaatggtttggcagtgatcacacaacaagccgaaagtagaatccaagtctctctggagtcccttctctgatcaaagtttcatcttattgaatgtcacagcattataaagtgagataaatgtatctcaccacacatgtgcttagtgaattattctcagtagatagcttcttctatttttaaacattttgttctgagattttaaaatttcaattctattctcttatgttttaaaaccgtgttcacagatttgagctaaaatgggaatcgaagagtgactttggcatttttccatgactattcttgtattgatcttaaactggcatcacacgtgttccaggagggcacttgttttgcacaacagttttacaaactagctgtctataagaggcagttcattaaaatttaatgtttttaaatgatctttagatgtatagaattttttaaagactacatattagagaaagcatgcatacaaaatatttttttttttgcccagtagtggtgataatagctaacatttattgaactcttactctgtaatagccactgttccagtgattaactctttattttaattttttttaattttatttttattatatattgacaaattacagttacatatttatggggtgcaaagtggtgttaagattttttaatacaatgtggaaagattaagttaagctagttagcatatccatcacctcgatatttaacattttttgtgacgagaacattagagatttactgttagtgatattgaaatgtatataacaattatattcaccatgctgtgcaattgatctaaaaaaggatcaaacttattcttcctgcctaactggggctttgtaccctttgactgtaatctccttttccccactacccccttggccgctggtaaccaccattctactgtctacttctatgagtttagtcgtttttcaatgcaatctctataaaaattccaatgccatttctcatacatatagaaaaataatcctaaaatttatataaaaccacagagaaacccaagtagccaaggcaattgtaagcaaaaaagaacaaagctggagcattacactactagatttcaaactactgtattctataaaatgatagtaattagaacacattgtacagtataaaaaaagacacattgaccagtggaacagggtagagagcccagaagagaacccatgcaactgtggtcaattgatcttcaacaaatgtatcaagaatatacagtaggaaaggacagtgtcttcaataaatggtgtttggaaaattggatatccatatgcaaaagagggaaatcgaacccttacctcacaccacctacaaaatcaaatcaaattggattaacatcttcagcataagacctgaaactgttaaactactggaagaaaacataggagaaaagctaaatgacattgtgtctggacaatgatatttatagttattaaatatttttatttaaatcctcaaaacaactctatgagatattattattcccattttatggataaggaaactgatgtacagagtgattaaatgacttgctagaggctaggtgcagtggcccatgcctgtaatcccagcactctgggtggaaggatcgcttgaggccaggagttcaagaccagcttaggcaagactctgtctcaaaaaaaaaaaaaaaaaaaaaaaaaattagccaggcatggtggcacatatgtatagtcccaggaggctgaggcaggaggatcgcttgagcccaggtgtttgaggctgcagtgagctatgattgcactattacactccagcctgggtgacatagtgagaccccgtctccaaaatgagtgaatgaatgacttgtttagaaagctattaaagcagtattgcaatccaaacattctggcccccaaagccacacttttgaccttattctttgcctcttaataatccttttaataatagtatgatttcattagctttgcccttgaaatcattttgactcatcgtagagccattacaaatttaatattatttgatgtctatacattctaaattatatttgtgtctaaattattgaacttctgttctttacctactcacaatttcactaggagataatttataaaactggctaaaatttaaaattgatgtgtaaactgtagaaacagaagaaactcaaaaccatttttcttggtcatttaaattctttattttccatttagtctggtctctgttctctaaatatataataatgtccttgttttccaaagctactaatccttataaaaatttcatggtgttgtatccaaaatatctaagttcggttttgattttttatacaggtttgatttttttttcttctcaaagtaatagtggatatagggtattttcaactagatttcacaaagtaagcatttataggcagattttcaaggtaacccaaaaggtaagttttaggttttacttagtactggaagaggaaaaattaagagtaattaccaactgagtataatttacaatggtgattaatagtctcatagcttccttgtcattcttctgtttagttactaacaattgtatttattattctgctaactttaagtaaacaagcagaagcttttctggggattctgaagtatagttactatcaaaatatagtcgacccttgaacgatgtggggcaagatgccaacccccaaacccccctgcactccccccagcacaatcacaatagaactttgacaaataactttgcatatgactttgaacttccccaaaacttaactactaatagcctactgttgaccagaagccttacctaaaaaatatacagttgattaacatatattttgtatgttttatgttttatatactgtatttctactataaagtaagctgggaaaagaaaatgctattaagaaaatcactatttattacgtagaaatggatcatcataaaggtcttccctgtcttcacactgaataggccgaggagggaggacgagtagggggaggtggtctgctgtctcaggggtggcagacgtggaagaaaatgcatgtataagtggatctgcacagttcaaccctgtgttgttcaaggcactgtatgtacacttttatacaggtaacatttatacagagacttaaaaatgttcacttttaagttcgttcttgtatctcatgttgataccattattttcatatgtgcatttattttcaggtagcacatactatatgccaataggaagttcaagaccctattaattataacagtagaagtcttaagaattcaatgtattgtctctgcatcctagcatgcaatggttgtggcattgagagtctgggcagagagagcaatgtatgtctggttagggtggtttcattaagtttcatgtgatatccttcagtcctaaacctccaaaatcacttttaaagatagcaatgtaaccatatacaatgatatttcagtcttttctgtaaaatgttaaaagtaaaagaaaaaccaatgtagtatcagtgaataaaaagctgcaggaaaatttatttctgtgtgttcagttagaaaagtgtgtttgggaaatacttttcacagtttagctgattgtacaatagcctctgaatttttcttactatccctaaatggtcaagtcagagagcatcattatggtttaaatactggtcagtaaaacacaatggacagttatctgttctgtgattatcttgctgttttcttgtcttgcataacactatagtactgtagcaggcagctattgaaacagtgttgtgattgtctagtttaacggaaggaaaagagcttttgttttcattagttttttaatattccttttgaagaatcactgtcatttaattttggtgcctggcactaagcagcaaatgcaagaggtatgcagactgccaaattttatgtaacagttgatgtgactattgcaagagtttgtggtatttcctgttatcatggttgtttagagaaattttatttcaccctcaccatctagttttctagtctctccttttccctgtggctttattactgatattaataacctgtgcattgattctatatacagtaataatttgtggttctacagaaagatgatccatttgagctggaatcatggtataaactaagaggcactggttacaaagtgtaaatgtaactcacttatgcctgtgacttttgggttatttggatttatttttctgttacttttttgcccacatgcttgttatttggtcatttctgggcttgggtcattgtttggcagatagtaaatgtagattacttgtttttttaactactctggagataaaatatgataacagcatattatctaatgcttcccagtgctccatatgccatttagaagtttggccagaactatgaaagcaaagttcttttgccctggaaaagaagaagcagttgaactcatattcttttccccacctcaaccccttttaaaaaaattttcgattcagggaatacattcaggtttgttacaaggatatattgcatgatgctgaggtttggacttctgttgatcccgtcacccatatagtgaacatagtagtacctgataggaagtttttcagcccttgtccccttcctctgtccccacttttggagtcctcagtttctgttattcccatctttatgtccatgtgtacccagtgtttggctcccacttataaatgagaatatgtgatatctagttttttttctgtgttaattcacctaggaatcactgcaaaatacatgattttgttcttgtttatggctgcttagtatttcatggtgtatgtgtaccacattttcttcatccactccaccattgatgagcgtctaggttgattccatgcctttgctattataaatagtgctgtgataaacatgcaagtgcagttgtctttgtacccatattcttttttttattattatactttaagttttagggtacatgtgcacaatgtgcaggttagttacatacgtatacatgtgccacattggtgtgctgcacccagtaactcgtcatttaacattaggtatatctccaaatgctatccctcccccttccccctaccccacaacaggccccagtgtgtgatgttccccttcctgtgtcccatgtgttctcattgttcaattcccacctatgagtgaggacacgcgatgtttggttttttgtccttgcgatagtttgctgagaatgatggtttccagcttcatccatgtccctacaaaggacatgaactcatcatttttcatggctgcatagtattccatgtgtacccnnnnnnnnnnnnnnnnnnnnnnnnnnnnnnnnnnnnnnnnnnnnnnnnnnnnnnnnnnnnnnnnnnnnnnnnnnnnnnnnnnnnnnnnnnnnnnnnnnnnnnnnnnnnnnnnnnnnnnnnnnnnnnnnnnnnnnnnnnnnnnnnnnnnnnnnnnnnnnnnnnnnnnnnnnnnnnnnnnnnnnnnnnnnnnnnnnnnnnnnnnnnnnnnnnnnnnnnnnnnnnnnnnnnnnnnnnnnnnnnnnnnnnnnnnnnnnnnnnnnnnnnnnnnnnnnnnnnnnnnnnnnnnnnnnnnnnnnnnnnnnnnnnnnnnnnnnnnnnnnnnnnnnnnnnnnnnnnnnnnnnnnnnnnnnnnnnnnnnnnnnnnnnnnnnnnnnnnnnnnnnnnnnnnnnnnnnnnnnnnnnnnnnnnnnnnnnnnnnnnnnnnnnnnnnnnnnnnnnnnnnnnnnnnnnnnnnnnnnnnnnnnnnnnnnnnnnnnnnnnnnnnnnnnnnnnnnnnnnnnnnnnnnnnnnnnnnnnnnnnnnnnnnnnnnnnnnnnnnnnnnnnnnnnnnnnnnnnnnnnnnnnnnnnnnnnnnnnnnnnnnnnnnnnnnnnnnnnnnnnnnnnnnnnnnnnnnnnnnnnnnnnnnnnnnnnnnnnnnnnnnnnnnnnnnnnnnnnnnnnnnnnnnnnnnnnnnnnnnnnnnnnnnnnnnnnnnnnnnnnnnnnnnnnnnnnnnnnnnnnnnnnnnnnnnnnnnnnnnnnnnnnnnnnnnnnnnnnnnnnnnnnnnnnnnnnnnnnnnnnnnnnnnnnnnnnnnnnnnnnnnnnnnnnnnnnnnnnnnnnnnnnnnnnnnnnnnnnnnnnnnnnnnnnnnnnnnnnnnnnnnnnnnnnnnnnnnnnnnnnnnnnnnnnnnnnnnnnnnnnnnnnnnnnnnnnnnnnnnnnnnnnnnnnnnnnnnnnnnnnnnnnnnnnnnnnnnnnnnnnnnnnnnnnnnnnnnnnnnnnnnnnnnnnnnnnnnnnnnnnnnnnnnnnnnnnnnnnnnnnnnnnnnnnnnnnnnnnnnnnnnnnnnnnnnnnnnnnnnnnnnnnnnnnnnnnnnnnnnnnnnnnnnnnnnnnnnnnnnnnnnnnnnnnnnnnnnnnnnnnnnnnnnnnnnnnnnnnnnnnnnnnnnnnnnnnnnnnnnnnnnnnnnnnnnnnnnnnnnnnnnnnnnnnnnnnnnnnnnnnnnnnnnnnnnnnnnnnnnnnnnnnnnnnnnnnnnnnnnnnnnnnnnnnnnnnnnnnnnnnnnnnnnnnnnnnnnnnnnnnnnnnnnnnnnnnnnnnnnnnnnnnnnnnnnnnnnnnnnnnnnnnnnnnnnnnnnnnnnnnnnnnnnnnnnnnnnnnnnnnnnnnnnnnnnnnnnnnnnnnnnnnnnnnnnnnnnnnnnnnnnnnnnnnnnnnnnnnnnnnnnnnnnnnnnnnnnnnnnnnnnnnnnnnnnnnnnnnnnnnnnnnnnnnnnnnnnnnnnnnnnnnnnnnnnnnnnnnnnnnnnnnnnnnnnnnnnnnnnnnnnnnnnnnnnnnnnnnnnnnnnnnnnnnnnnnnnnnnnnnnnnnnnnnnnnnnnnnnnnnnnnctggctaacacagtgaaaccccgcctctactaaacatacaaaaaattagctgggtgtggtggcaggcgcctatagtcccagctactcggacggctgaggcaggagaatggcgtgaacccaggaagcggagcttgcagtgagccgagatcgcaccactgcactccagcctgggtgacagagactccatctcaaaaaaaaaaaaaaaaaaaaagaagattgtgtaccggcagtgaatatatgatctcccttttgacaatcggatattcacaactgagcgtttgtccctatgtcctctgaaagtgatggttggatttataattttttagcaagatccctctggattatgcgtgcatttttggttactagatacagatatacctgaaagccctacttttacattgtaaagtttgttagaattcacattctcttcggtgtgagtgaagatggtgaacctcatagtagtgtaaaaataataaaaaatgtttcaaatctgagcctcaaagaggttggcctgatggattcagtccataaataggacaggtgggtggatggatgatcttaggtaggcttactgactaaagtgacttttaaagaagtttttggaggacagacctttggtggattaataggtttgttccaagcgtagggggtggcataaaagaagatataggcagtagtgggcgagagagacaaaggattcatttaggagaaaacaacagggaatgggacaggatgtgggaggagatgagatcagacataagaattggaaaagagttgtggaccatttaaagacaagaaaaaaagttgtgctttaaatgttgagagccaacactgattagaagtgtgtttgaacatatactccctctaaaagagagaatgctagcagttcagtaagtttcattgtttaataaaaaaagacagtgggcagagcaaaaaataaagtgattattaagtgagtgattatataatttatgatccaaacctggtcactttaagagagtgaaagggatactatttagtgagacaaaatgtgtaaactgggactggacaaatcaagatgtggttatcccattattattaaataatgacttggaattcattaatagatcacaaagacaggaaaaattaaaatcctgagttttgaaagtgacacatcgtaataatcctttaaaaactaaacaggaaggtgtcagattttggtcaggacaagcagaaacagttgctgaggttgatagacaaatgttggtgttttcatagcattgtgcatatggtgcttaggctatgagtcaggctgcctaggcttgagttctagttctgccactgaccagctggtaatcttcagcaagcaagttgggaataacagggaaacctgcccctctgggttgaggccaggtttaaacgaggccatgtgtacacgcaaaatactttgcacagtacatgtcacatgctaagcactcacatgtggctattatttttttctactattactacaataacaactactttttatacattagcagttagcatattttcaatttaaagataaatactttaagctttctgatgttgttgtgagctttctgccttttatttctagcaatatttcagtaattgatgaaataaattcgaaaaactgtttttcattccagctttaatattatgaagctcacattacaacttctacctgtctagactgttcttacttttcataagtagacaagtttctacagtcatataatagaattattgaatacagtaattctcattttacattcaagtaagtcttaaagatgtaatttttagcagcattgtgtttttcaaatccaattcctgctctgtagcagataggttctgttgttgctgtaaatgatagctgaatagtaatcatttaattttctcttttaagaaagatgaaacttttcttggggatgggggatggttcttggcaaacaaaaatgatgtgatttaggtcttttatagaaattcatgagattacttgtaattcaacttgaacatgtccttcttgtatttattgttcctttttattgaaatactctttctcaagattgtgcacaactcacacacacacagcatcttcaggtctttgcttaaatgacacctcctcagtgaagccttccctgaccaccccttccaaaaactaaagcctccttctagcactcctcattccttctgtagctttattttataatgtcataaatgatggttattttagaagccctgtaatagttcttcttacctctgagatatatgcggtggtcccccattatcctcgttttgttttctggggtttcagttacccacaatcaaatgtagtctaaaaatattaaatggaaagtttcagaaatagaaaattcgtaagtttttaattgtgcactgtgctgcatagtgtaattaaattttgccgtgtcccacctggaatgcgaatcatccctttgtgtagtgtatccctgttgtatatgcgacctgcccattagtcacttaacagccattacttagcagccatctcagttatcagatcaaaaaaccatagtatatattgggtttgctactatccatggttttgggaatccactgggggtcttagaatgtatcccccgtggataaggggggaatactgtattgctgcagtatctctgaactctgactctgtgatggaataagggtttgcacttctctactacctcagtaacccagtccttagggaattgagctttcttttataattagtttgcttgtaagagaacttatggaatgtctaatcttagttgggagtgagttgtggccttggctaaggatgaagtgacaatactctttcaagcatagccctctggagaaaaggccacttcccttcccccgccaaaaaaaaaaaaattttgttttttgtttttttgtttttcccaacagaagagtttttactactggagacccaagagccctaacttgctttttagtgggaagagaggaactgcctcatcttaaacacatccctatgtatattagtcagctcaggctcataacaaaataccatagactgagtggcttaaacaacagaagtttattttctcactgttgtagaaactggaagtccaagatcaaagtgccagtagggtggggtctagtggggtctggtgagggccctccccttgggctgcagatggctgccttctcactgcgtgttcacaaggcctcttcttagtacgtgcacagagagagagatctgtggtgtctctttgtatggagacactaatccttttgggtcagagcctcacccttatgacctcattaaccttaattatttccttattccaaatacagcgatactagaggttagggcttcaacataggaaatttgggggagacacatacattcagtccctaacactgtgcatcccaaattatttctgagttcagttcaattaaataaacattttttgagaccctgttaaatgtacaggcactacgctaggcatcaaagaggcagaagtgaactatcccaggctcaagaacttaatatttagtgaaataaaatgtatataattaacttgaaaatgtggtaaatatttttctaagctacattttgaagggtgaatcgaaaattgccaggcaggtttgtataggggagggaagtgagtgtaggccaagcagttaacggaggaacagaatggagtgtgcaggaatgatgagcggactgatgtggagtgaagtaaagagtgatgggcacaaatttagaagtgcaggactgccttgtggtgtttgtccttcctgatggtgccacaacgttttctggaaaagtagcaagtacctaatatgttgattttcacaatgaaggataagttttaaaagactatcaatgactggcatttacaatctacaataagagactagttgtgcaaataaaatacagtgatacaaatcacttaattagtgggattaggtgaataaaatttcccctcaaatacgtagtgttgtatttaaaaaatcacagtgaaatttaaaatactgtggttatcagagatggaaaaaaaatgtgcaatcaccacttcaagtaaggaaaaacattacattaaaaatctttggttttctccagtgttccttaagtttctacgtaaaatatctaaaactgtggggttttcttcacacagatgttcaaaaatcactattcacttccaaccaagatagagtaacagagactggatttacccttctgcctgaaacaacaaccaaaacagacacagtatatagaacagggactttggagacactgggcatcaggcaacaaaagaaacaaatccctgagagatgttagcaattgaggggagccctgtgagtattgagagttcccagaccactgttcagaattatagctaataagccaacaaatagaatcataaaaatactcaacccaaaagaaggcagaaaaatggaaaaaggggaaaaaaagaatcaataggacaaatggaaaactatagcaaaaggatagatataaatgcaaccatatcactaacaccagcaaaagaaagcaggagggacttatcaggcaaagtgacttcagagaggaaacatcaccagaataaagaaaattatttcataacaatgaaggaatcagtgtatcaagaggactattataatcctaaatgtgtactttataacatacacatttgaagcaaaaactaataaaattgcaaggagaaacaaattacagttatagttggagctttcaatatatctttgttattaactaatagaaaaagtagacagaaaatgagtaagagtgtggaagacttaatgctatcaaacaacttcacctcgttgacatttatagaacactccaaccaataacagctccagccaaaacatttgcataggaacatttgccaacaaagaccatattctatgccatcaaacaagtctcagtaagattcaggttataagattcaagtcatggaaagtttgttttctgacaacaatggaattataatagatatcaataatggataactttctggaaaatccccatatatttggaaattaaataacatacttctaaataatccatgaatcaaagaagaaaccaaaagcgatttttaaactaagtgaaaatgaaaatggaacatatcaaatgttgtgggatggctgccactaaagcagtattttaaggggaaggtatagcctgaaatgcctatattggaaagaaagaaagatctcaaatcagtgacttcagctttcaccttaagaaactagaaaaagaacaacaaattaagcccaaaataaaataaaaataataaaaagcaggaatcactgatatagaaaacaaatgcagtagataaaattaaaaccaaaagctcattccttgagaagatcaacaaaaatgataaacctttggccaagattgtatgtggagtaattttgggctgtatcttgaacatatgatggttacacagattaggtatccctaatctaaaaatccaaaatgctccaaaattcagaacgttttgagcaccgacataatactcaaaggaaacattcactggagcattttggatttcaaatttttggatttggtatgttcacctggtaagtatcatgccaatattccaaaatttgcaggaattcaaaattaaaaacacttctggttccaagcatttcagatgaaggaaattcaacctgtattgtggggactctggacaattctattataaaccagctggtttgtgtctcgtaaaacagaataacatgttctctttactgggggatcaaggattaaattaaaatgcatttatgtaaaaattaaagattttttcattggcatataaatatagttctgagtgatctcaaaatcatgctgttccacggaaacattcattttgctttgggtttctctcataaatcatcttaacttttatccttgactttttcttaccagagcacatctcttttgtttaaaatacccatctaactccaacacgaccttgactctagatggtttgctgcatttcatgacgtggtatttccagtgattctccaaatcagaaactgcatactaacggcctgcagcctggactcaggctagagaggtgctgtgtttggtttgcacagttttttttgtttgtttggttttggttttttgaagttagaatttgttgctaacatataacaagttggaatagctggcaatgcagagcccacagtcctccatgccagaaatcaattggaactgaatggtgactttttccataggttctctcttaagggtttttacattaattccctcaatttaaccatcacagcaactcttaactgccaccatcattatcaccaagtataaggaaactgagtctcagaaaaattaagtgtcagaaatcccatgagctattaaatggaggagtgggtgtttaaatacaaatgtgtctgaattagcctatattcctttctgcataacatcaaaaatgaggttattttatctttcagttgaaaaatcattggtatccataaatattatatgatgctagctgtagtgccccaggtatcaagtttatcatgttaaattgtgcaaggttaaaatttacaatcatttatcaattttctttaagttccttaatgtggagtttaccataggctactttctcatttctagaatattgacatttgttgcctgtactgtccatataggttactgataaataattgagaaaggtgttcactttaacattgttttcctatttaaattctttatttaatatgattcccatttatgaaaataacaactaatcactaccagagaacgaggatgggcactgacatctatagttttctggtttcaaaaggaacacagaaattaaacttcattttgaataaaagctgtccatgatttagataataatttatatctcttatcaagaaaaaagtcttccttacaaagatagacttgtatattctagcttaataaatatttactttttgactgaacagattagattctttaatctgggactgtttgtttctatctaactagcattgttatcagactagagttaggtttttccatacaacagatcacttgacaaataattaaatacatctattatacaaaagtaaactggaattaaatactaacatttatagtctaggtcatgtaatttcctctaccaaaagtaaggaaaatattaaccctctccactttagtataaactttaaagaagttcaacagattcatgctttgaataaagtatcttttgctttctttttttgccttaagtggaaatgatggtgctggtagtaagagattattttactgttgctatctctgctgattaagaatgaacaaaatatcaaagcatttacatacagaggaagcagtagatacttcgtgttaaacagaccttgggcaatttactttccctcagctcccttctctgtaaaatagggatagtaatatctaccttatgttgacaatgatttctctaaagacccaatcctgtatttgttgtgtaatagatactctatagatggtaactataagcctattcatcgttgttgtcatcatcatcatcatcatcacaacaaaataactttatggttttgacagacctgaagatatattgtgtggtaactatatattccaagtcaaaagttgtgacatggtttgtaagcaaatggtagaatcacattaggtgacattttaagtactcagtatatcaagaaactttacagtaggtgtcttaaattggacactgttcaaacaaattagaaatggagacactctttaagcctaatagatctttactgaatattggtcaaatctccttatcagttgtaattacagtacagtgaaaagtctgtgtaacccaaagctactgagcttcagattttaaataactcatagcaaaataaagttcagtaatagtctcatacatgaaggcagtgagatcattatggaatggaaagagcactggattgggagtcaaaagaccagagttgttctggctctcagaaagctttgtgactgtggtctagttgtcacctctcttgtttttcatcaacactcaaagaagggagctggattacattgtgaagatcccaaatataatgtatcaatgcccttcagtgtgctgtaatgggaattaactgtagcttttgagccagcagagggagcacgaagcatgaatttatgtctgggttttaggaaaatgggggcgtggtgggggggttacatggttaaacattaattacagttcttaaaatagattatttcctatcaggttatacccaacttgatttgatctataatattatctggagatggtggcattcttaaaactactgatagaattctacctctgtaattatcggtagttataataaaggactatattccaaaagtacatttaatccatggttatttctgaggattactatcgtttattttctctattgttagtgtatttttattagaaagaattataattttatcattttggaaatattctgttgatattgaaataactgggctatttgaaaccataagaatctttaagtgatacatcatttatctagcattcttgggaattgtgcagttccacatattttccaaataacaaaagtatgtttcactaaagcgccaccttaaaaatgttagaaagtatttgggatagagatcttgctattgcagacttttaggagtttgaagtaaagaccttacacacatttgaatctttttctcattgctgcagggttgttgatttgagcatgtactgatgtactaaaccatagtggaattctgagtttgctccttctttgatgttgaggcccatttttctctttttggtcacactactcttagatttttcccatttccacatattcccattctggttttcctttcttctttgttgcttttattatttagaagctttcactgaggaagccagtaactgagctttctgagaactgtgttaaattaagattctaatttaaggcctaaggagttaaatccatggctttcctataggcattgataacaacttcattcatggaaattgttctctctttgtggtttcggtttatgtattaagaggttggaaagggagctacttctttattcaggatgagtcacagtagagatgggtttcttatgaagttactgtaaatatatgattggttttgtggtttttctaaaaagtagttttagaactttaactcaaagaatatcttatccaccagtcagtagatagtttatttaaaaggaaaatgagggatcattaacccactgaaaccattggtatatacaggaggcattgtggaagtgttaaaagaagaaaagaggaatggacatctgtgcccttgaacttgtattcacataagaaatgagacaaacctacaaacaaaagataaaggaagacatgggaaaaatgtgtaggacaagtataaattaataattaggtacacaaagatcaaaaggaagttgaaataaatggataaagtttttacagacataagatttttttatagtgatgaagctaataggtgttgaaaaaaggcatttaccagtaaagacctataattccagttaaggcttcctgttcctatggccatcccaaagactaattatattcactaaattaagattaagggctaagcaaaaaagaaatttcaaagttccagttgagattctcaaattaagggtccaacacctgggaaatattttggctatcaattgtgttataacgtagttataggtactctgcagcatttccccaaagttagcagtatcatgtttcctgtgactatctttgtaaaatctgacatatagtaaacatgctttatttggtaggtttcccctgagaggaaatttctttacacttaggaagtgccttatgacctgtgataataataacttctaccctgccatcctggctcctcttgcactcactgtgaggtcattccactttccaaatgaattttctctttcaatgttatttcgatcccaattattcccataaattagtgacactgtgccataggatttttaaaaaactggacagatttgctatttccttggtgtgcaattttctcaagagactaagaaagggtcaccgaaaaagacaaccaaacttctttcaagtcagaaaatctctttctttacagaacataattttctaatagagaaaataccataaaacttctaataagatcgatatctttagaattgcatactaattataaaaaattagactttcatcgtagtttagtttataaaggatatatacatttttaaaatccattgtccatgaaatatgtataaaaggagtaaagtgctttttagataaattaccaatttttaattttgtaatttttgctaaataacatttctgaccaaatctagtcaaaattggaaagaagccaagcacagtggctcacacctataatcccagcactttgggaggctgaagtgggaggatcatttgaggccagaagttcaagaccagtgcgggcaacaaggcaagacctcatctctgcaaaaaaaaaaaaaaaaaaaaagccaggcttggtgacacgtgcctgttgtcccagctattcaggaggctgaagctggagaatcacttgggtccagaagcttgaggctgtcatgagctatgattgcaccactgtactctagcctggtcaacagaatgagaccctgtttcttaaaaaaaaaattgaaaaaaaatgtgcttatgttaaaaacacaaatgaaatttgcatgaatgtttttgtggaaaatgaaaataattgtctttaagctaatgttagattctcttatttcagtctcttataaatttggtagtatagttaccagagtgtatattgacagattgtgtattttacctattattttcaacatattttatcagcaataatttttgtaacatcattttttaagttgttagccatctttcagttttctttctatgtcttccacattttgactttagttaccttagctaggggaaattcaattcctgagtttcagcatttttttaaagaaacattgtttagtccaatactttgccatgttgtatgactagttattattgggtttacatataatttttgattatgcagtcataccatgaaggtcatactgaatgttgtactataattttgagttcttgctaagatacattatgtgtttttaggattctaggattggcttctccagttacaatgcagggtgtgcccttttggtgggaacctctttcactaaatatcacacatatatttctttgtcttttgcttttactatatatagagtttttgaagaagatgagttattgtgttttctttatagtgttgaaatatggagcagtaggttctactagaacatgtgtggtgcttagtgtactgatggacacatctgttgtccatgcattatgctgtgtactgctagtcacaagacatttgcattttaacaagcattacttgacagtcagcaagctggtggtgctgagttttgttattttgttctccaccttttattccataaaatcaacatcattttagctcttgtcctggatggaaatgaattttaagctagttattataaacctaaaataatgtttatggttagtaaggcaattaaatgtgaatgaacgggcagtttaccctgccctaaccttgcttctttgtataaatgtcagtgttcttagtaaagattgttacgtaattagtctttccttcattttaacttttggtccttaaagataagatttttaaactaaaatcaactaagactgcttgtttctgattttgtaaggcaagaataccgacgtcattgcagtttcttttattggagtaagaacgatagaaaagaagataaatcatcaattagtagtaagcatattttagaccatgttgtgcgcagaacactgtccaaggatctacaatcaaggccttaaatgaacttggcatttggaaaaatacatgtttacagtacaaatatgcattacacttgtgtgtagcagtttaagagcaactatgaagccgcatattgaagcaaacaaataattaagatgacataatttgatagagaaaaaaagcttgggaagttactatttctattataatctgcaagtaaaaagagacaagtttcataacatgaatttgttctgtcttcgtcggctttgatgtttttttctgttatggtgtattaatcctcacatgttttccgtatttgttagaaccatcgttatctgtccctttcttcttcagccttttccctcagttctcgctctctctctgtctcagcttaagttcacttcattctctcttcttgcacatgggttttctctgtgaagctaagcgtgaccatagccaactccgggattacgtctttacaatcttctaaccagagagaaaaagcagctttctcaccctttctagttagtaaaatcctagggaatatttccagctggctcaactagagcttatattcattgaccaatctttgtgactcagggaatgagcctgtgtcataatctcacttttttcaggaaagtagtttctgtttctgaaagtagggggtgagagtgaatcatattggacaagaaaaatagccatcataattaataaatctccatataagagataatgaagtagtgtaatgagtccatggtctagactcggattaccaggctgtgaattctagctcttccatttatgaatagtatagtccttggcaagttaatttacttctgtatgtcatcacttataatgtgatgttaataataatactgtcttcattaaggagttgtatatttagttaacaaatgtaaaaggttagagagatgtgtggcatagagcacattctcagtaagtgctagctgccatcattcttattatctacatcatcatcatagaaaaagataccattgggacccatcctaggaattgtaagtctggtttaacatgccataatcaatcagtaccatccactattttattagacttaaaaagaaaactatatgatcatctcagtaggtacagaaaaagcatttgacaaaattcaatggccatttatgaaaagaaatgaaaccagctttcacataacaaggaatagagggaatttcttcaacctgacaaagagcatcaatgaaaaccttacagctaaaatcatacttagtgaaaaatgatacttttcccctaagatcaggaaaatggcaagaatatgtactctgacctttattcagtattgtactataggtcctagccagtgccataagtcaagaaacagaaatttttaatatccagattagaaaagaagatttagaactatcttttaaattttattaactatttagctatttgcacaagacatgaatatgtgttttaaaagtcctaatgaatctacaagaaacctactaggatttctaaatgagtttagcaggatcataggacacaaaaaggtcagtatataataattttattgttgaatttactgttaaatttgttattgtcagcatatagcaaatttatttctacattcttgctatgaacaatcagtaattgaaaaataatgccatttacggcagcatcaaaaatatgaaataacttaagaatagacttaaaatacattcaagacctggtacactgaaaactataaaacattgctgaaagaaattaaggaagacctaagtaaacagggtgattttatcctcatggattagagacttagtattgttaagatcctgaaattgatctatacgttgaacacaatcctaatcaaaaccttaccaggtgatttggtagaaaatgacaagttgattcaatattatacaaaggacctagaatagccaaaagcaattttgacaaagcctaagttggaagactcacactacctgatttcaagatttactataaagctggtgtaatcaagacagtgggataatagtgtatgacagatttatggaccaatggaattgaatagaatcaagaaatagaccagtgcatatatgctcaatgaaatttcaacaagggtgccaaggtaatttaagggggaaaggataatcttttcaacaaatggtactggaacaattaaatagctatatgcacaaattaaaaaaaaaacacccaaaccaattaaataaattgtgactcttcatgccatatacacatattaatgcaaaatggatcatagacataaatataagaactaaaactataaaacttaaaacttaactgtaaaactatagaagaaatcatagaaaatctttgggatcttggattaggcaaagatttcttagataggacataaaaaacaaacaattttttaaaaatgtgatgaactgatgaatttcatcaaatttaaaatttttgctcttcaaaagacactgttttttgaagaaaatgaaaaagacaaactgccccactaccaccacccacaggccatagactgggagaaaatgtttacaaaacttatacctgataaagaacttgtatccagaatatataaagaactcttacaactcagggagaagaaaaacaacccattgttttaaatgggcaaagatttgaatagacacttcaccaaagacaacatatgagcactagaaaactcatttggaaaatgcaaattaaaaccacaaagaaaattacttcacacccactaaaatggctaaagtgaaaaagactgaaatgccaagtgttagcaagaatgtgcaacggtttagcagtttcttatagagtgaaacaaataacatacaatccagcaatcttactcataggtatgtattcaagagaaatgaaaacatatgttcacacaaaaacctgtacaactgtttacagcagccttcttaatagaccaacactgataaataaagaaatcgaggcacgtctgtgcaatggaaaactactcagcaataaaaaggaatgaattactgatatacaaaacagcatggatgcatttgaaaagcattatgctgagtgatagatggcagacacaaaagagtacctaaggtataattctatttgcagaaaattttagaaaaggcaactacagtgacaggaagcagatcagtggttgcctggaagggtgaggggaagggtattggagcaggagattgagtgtaaaagagcccaaggaaactttttggggtaatggaaatggtctgtatcattattgtagtgatggattacatgaatgtttacatttttcaaaaacatttttcattgcactgtctacttaaaatttgtgagttttattatataaagattatttctcaataaagctgattaaaactaaggtaaccagtagcatagggctgtcattaaggaccaccagtggttcagaagcagggagagcacaggtttgagaaatctttcccagagggtgtggaatcggtggtatgggggctgtaaggacttgtaggagaggaggaaggaggggtgtctacacgtagagggaatcagtgtctacagatgagagcatgacacttggtgtgagatttggtttgtagctcccactccacctctaataattttaatagttttttggttttttttattttttattgttttacattttagtagctctttaggatttataaagaacttttgtattcactacataatgtaaatttgatcacgggtcaagcacctaactctctacacctaggtttctttatctgtaaatcatctgctcccaggtcttttgtggagttcagttacttctcttttcccctatgactgctgttactagtgtgttagaggaaggactgaggcatggagagagaagttggctgagagttgtgaggattggcagggctctcataggaaatgtctgaaactttcaaagacagaacctccacaccccctcccagtaagtgacctttctgtgatgcgttccctttaccttcggagcattactctagcactctgctccccagcaatgttcaacttcttaaaaatctacacctattttctgtacttcctcacatcctgcttatttctcaagcgctgcagtccagcttccgcctcctcctcccctctgacagtggataaagtcaccactgatttgtttccttgtgccaaatccagtgacttcgttttttgtttttttgttgttgttgggttttgtttttgtttgtacgtttgtttttggtaaatcctactttactatttgacagcttttaacagtgatgattatttcctccttaaaattgttctcttggcttccagaatgtctttctttcctagttcttctcctacttcttatttaagtgaccctttctggcctctgttcaccctttcggtcttggtgtttcccacagttgctttnnnnnnnnnnnnnnnnnnnnaaagtttttttttccaaagtttttcccaaattttaaataaaggaacccctttgggccccgtttaacccctcgggtttgggggtttccccaaaggggtttttttttttttttttttttttttttgagacggagtctcactttgttgcccaggctggagtgcagcacttgagaatctcagctcactgcaacctctgcctcccaggttcaagaattctcctgcctcagcctcctgagtagctgggattacaggcacgtgccaccacgcccagctagtttttgtatttttattagagatggggtttcaccatgttggtcaggctggtctgaaattcctgacctcatgatccacccgcctcagcctcccaaagcgctgggattacaggtgtgagccagcacacccgacctcatacagttctttcttacattacacaatatccttgggtgatcacctccacttttgtgattgcagctgatgcaaatagcctaaaatttctcctcccctctcttctgagcaccaaattagtatttctaaactgcccatctgcttctttctgaccatctccacctgttgttcctgagcacctgtaggtttcctagaagatttgttaagagcacagattctagagccagcaatgctagcattgactcctgactccaccacttagctgtgtgcctgggcaaattactctctctggttcaattccatcatctatttataaaagggggagggagaatggataatggtaggacctacctcacatggttgttagatggacagcacctgatatataactcataactgctgctactgttattaatttctttttcttcctgagcgctctccctccctttcaacttgttgtattcctagcatgtcagtcaccttatcagctagccactgtgtttcccaagttagagacctcagtcagccctgattcccttctttcccgctccatgctgtctctgccttccacatagctcccatttgctttaaggcatcctcatctctttatttggataatatggacgtttcctaaaggttctgtttctagtcttgttcacttgtcatctcctgtccatccttttctccaggagcagaggagtctttctaaaacaagtagaattttatacacttggcccacattgctcaggtcagtggttttcaaccttcggttctaggagccctgaagttccatggtagagactctgtggccaccatagatggcagggcatagggaggaggcttaggacatagaggcacaaggagtaatctgccatccttactgctgagccctgcctcccacctcacacctcaataccaaacacagcagttttgcgttgatcactttctcatattgtagtcctgctttcatagaacacgtctggctttcaggatgaagtccaaggtctgagagagacatgaggcagttgataagccatcctcactgctacccagcctcattgctgtgctctgctgtgtactcaacacttgatgcacgtgcagtgctgtttcccccacccacaggactcgtatttctctgcccaactcacctttgtgattgcctgatttgctcagctgactcctaattgtttcttaagaagcagtgcaggcatcatctcccaaagtgattgcctctttctcccttcaggtgcagttgagcagtcctcacctgtgttcccctaacattccatgttcacctccagtctatttaggcacgtcctttctcacctgactgcgccctctggggaggcaggacagaaactgtgttgcttttgctttcacattgcctggcacatactaggcgctgggtaaatatttgactcactgtctgtctcaatggctgagcaagatgaaatgcagacctcttagcatggtccatgtggccttcttatttggcccctcttgtcttaccggcttcatttcttgccacttctcacccctgtgagttttctctattcttgccttataagttatgggtatttccttgaaatctcccagtgcctttctaaacactttcccccttctgaattactcttcctccccgtttgcttttccaaatagcaagtcctctaaccttcaaggccacagtcaagatagatttcctctgtggaatgcacctaatcttccccctgttctcccacagcgctctcttcagacccatggaattctctgatttcagtattgtaaaaattttttttttctcatcccagtagacttgagttccttgggggcggggagccatgtctctttcattattttgtaagaattagcttctcactccgaatagaataaaagtccagggcttttgatgtgccataaagcggcccttcacagtctggcttcaaactgtcttcattctggtgtcatctcctgccaccatctgtgtaccctacactacagccatttccaccagcttgtgattttctcagcgtgttcccgtttggactgaccacacttattctgtttacatgctgctttcttttgtgaaatgctgtcattggcaggggctctgttttcttcaagatagcatgttctttttatcagatttttaaaacgttatataatacttcctgcatacacaaaaaatagagcaatataccactctctcatgtatgtatccagtgttacctaagaacattttatatatactgtatatgtgtccatatatatatatagagagagagagggagtactcatgtgagagctggactccctttttcctccttcctcagagaacagtggctatcctaagtgtaggatttatcatttccatatatatttgatgttattaatatattttatctgtaaatgatgtgtaatattgtttttcattttaaaaacataaaatcagcttgttcatattttctaaggattcctgcttatttttttactcaacattgtttttgagatttattcatattcatacatgtagcattagataattttaaattgctgtataatatttccttgtataactatcccacagtttatttacccattctgttcttgattagtgttttggctgttttcattttttaaatttgtaatgaacattcttatgcaaaaagaaaaactagtctttttcaaattttaaaaaagtattctagcaaatagatcccagctaagtgaatattaagctaacttaaagatcatttttatttttaagactgatttttaaaatcaaatttatccatttacatacaaacatcatatatctttattccttattctgattagcattaagctgggggtaagtacgttgaatgcaaagctttaagcaaaagttactcttttcactaagcagtttgcaagtcatgtctcgtatacattttgccttaaaaatgttaaataaaagccaaaattataatgtttaaataaaactttgaaagtacttgctataagattttagtaaaatgcctgttaaattgtatgatagtaacaaaggaagtgtgcattctctgtttctcttcgatggagagctgaatgtgacctcaaatgatctattcttacagagaatttcttaaagatagctagaagcagtatccacagcttcttggggtataccatttcaacatttgtgtccttagtagtaaaattttccattatgctcaaccaaaatatctcatgtttgaattgaagctcacttccttgtttggtgtcctactagcaagcaaaacagagtgttcatactctcttttaaaatcagtaaacaaacaaactagcctttcttctctaaaagaaacagtttcaagtgttttttgctctggtccctaggactgtttaataattttcttaaattgataatgagagttactatagatcacctctattgttctctgatagtgcactaataggggacacaggcgcgcacacacacacacacacacacacacacacacacacggaatgtgagaatgaacatcccaggtttgctaaactcaggaagcacctcctgagttcttattttttcttcaactaagcaaagtatgctgctgtgcttcacttgttccatttcttcttcctaacaccaagaagctcacttctttcaggcatatttattgcttttctttttttgtttgggtagccaatttatgtttttgagtcttgccacaccttgtgcaagaattgactacccaaagttcttttagcctcaaaaaatttctgaaattccatttattccagaaaatatactgcaactaattagaagcgtattactgatttccttctgtatgcatttccatgtaaacatgtcttataaacaatcccaatttttttacctttttttttttgcatctcctgcaaaataatttacatactcgaaaatatggaccccctaatgcagttcagtattatgttcagttactcttactcagcagttttgcttcaggcaatttatccaaaagatagtctcactcaggcatgctaaaacttatttacaagggtgttcatttcaatgctgtttataatataaaaatttggaaacaattgcagtgagtgattaataatggactaaataaattacggtatatccatatcctttgatatcaagtaacagtaaacactcatgtgtttgttgaatgaatgaaggaatatattgttagatagacaaagtgaaaggtacagcatagtatatatttcatggaataacaaagatggatatatatgtatacagtatgcatttgtttacatgcattaatgcatataaggtttctggaatcatacacaataaacttaatattagttatcagtgggtcatgagaataacgatgagtggaaagtatggtgtttactgttaaccttaaaaaggaaagataaagcaaaactaaacctcaaatggagaagacccagaaaaataaaatgattggaaaaaagtgtgtgtgctcttatgtactgaattctgttttctacttcttgtatagtacctccattccaattttcttgctctctcctacttttgcctctgtgctttgccttctatttggaagtggcttttattctctcttgcacagataactctttcttctttttcaagacattgggtagggcctaaggtgaccttcatgaaacttcactggagtatttcatttcagaagtgtttcatttcaaagaaatcgttcgttcagatatatcctcagcatgtaaccagtatcataaaatttcatacttattcattcagtaattacttcatgtaattatttttcttcccactttatttaagtataaatgtaaataatattcattgcctctgttatgtttgttttgtacaacatctaacattaccaataaatgttaaggaatttttttccttgatgatatgagttgaaacttaatctagaaagactacttagtggccctgtcttcaatggatatcctttttaaaccatctgaaataattacagattttcctaaattgatatttaaatattttatttgtaaggggattactaaatactacagtgaagttttggcataaaaaaatactaaaggccatacttcagatttttatgggaagtacatggaatcagaattgcctttgtttttaagctgccatctatcccaaagaagaatcctttctttatttgatacaataaatttaatattgggatcatataattataatacatacctctgaagttcttttattaggcacataagtatttaggattgttatgttttcatggtaaactggctttcatcattataaaatctccctctttatctctagtaataataatattgttcttaagcctactttgtcggaaattaacatggccattccaacttccttatgattaatgtttttatagtatgtcttttttgtatccttttgttaacttgtctgtatctttaaatttacaaatgtgtctcttttaaactgcacatggttgggtctcgcttttttatccagtctgaaaatctctgacatttaactggagtgtttagtgcatttatatttaatgtaaatcaactgtattctttgaagattgtttgttttgctctattagggtgcctcttagaataaagtaatttgcactctagaatagaatagtctgactcctaaagcatggcctttctaagcattcaactaaatgttcatgttcattgatttttatcttctggctggttggagctccaatatccctcagtctgttatggtccccaaaatctctgtttaatttacagctcctgggtagttgtttactgccacaccttgtggagtcttgctctgcacattacagcttaacatttatacaaacattcaagaagacacttggatttctggacctgctttctggaaattctctcctctctagtattccaccttgcaaaatgcagttgccacagcagtgttaaattcctctctctgccttagctcagcacaacactgctgtgtactctttgggtcccaccttcctggaccatagtctgcaatgttcctcgagacagaagctcaccattatggggctcatcttcatctcccttttgttagggattataatcctttacttcacatgttgtgttacatctgaaaacagttgtgtcattttttttttttagttttcagttagtgatagcaggagagttagtccagtatcagttaatctgtcatggccagaagcagaaatcttataaaacattttgaatcattatttttgagaaataaagctataatacagaaccatagactctgtatgacagtagagaaataatcttgtccaacacactttttcagaagatgagaaaatacacaagctcaagtgacttgtagtagattgcactatgagttagtcatagtctacatctcaggtttttgccactattcttttccctatagtaatcttatgaaaaatgctcctgtgtttgaaacataattttaaactgtcattaaaaaattttttagaattcttatgatttaaacatcctccccactccttttttcttacataaatactattattaatcttgctgttaacacaggcatgaagaaagaatcatttacaagtatattttagaataattgacatgctgtggaactatatatttccacagaagacagaaaagaaaacagttcctttaatataattggttttttgtttgtttttccagtttattttctttgctgtctaaaaaacacaacaaagttctggaacaagccacacagtccttgagaggttcgctgagttctaatgatgttcctctaccagattatgtaagtagttaccttattcatcaataaaaaattttcctttcagccaggcacagtaactcctgcctgtaatcccagcactttgggaggccgaggcagatggatcacttggtcgggagttcaagaccagcctggccaacatggtgaaaccccatctctactaaaaatgcaaaaattagctgggtgtggtggtgcacacctgtagtcccagctatttgggaggccgaggcaggagaatcacttgaatccgggaggcagaggttgcagtgagctgagatcatgcccctgcactgtagcctgggtgacacagtaagactctgcatctcaaaaaaataataaataaataaattatttcattgtaaaatttataatagcattacccctctcttctcaagattttactgtgctgaaaatctttgctgcccaagaaacctctaatatgcaaatagaagagtgatgtctcaaatcaagggaacaagttgtaaatgattgttaacaagtggttgaagaaaatcaaccttaaaccaataatttgtacataattaagaatctttatatctgagttgagaaacccactcaagctaataacacaaaaacaaaagcagggatgattttataggaagtatgcaaagattccttattgaacttaaggggagcaagtacacctggatttcccagagatctggaacctaaaattgaaaagccattgggtcctgttttgggggtcatttcgtttctggtctctgcttccttttgcttctgctttattctgctgctgctttctaccatccaggtttatctgtttgcttacttggacctaaaatagcaaccccagcccttcctcttcttccctccaaccttgtgagtgcagtgcctttagctgtcttaaagtcttaaagtcctcattctcaattcctgagaaagagaatctaattggctctgctctcatcagggtgtgactccagtcttaccagacatggtcagaagagagcagcagtaacatgtggcctttgttccatccaccttaatgacgaagagtttattaccaactgctacggttgaatgtgccatccaaaactcatgttgaaacttaatccccagtgtggcagtattgagaagtgggaccttgaataggtgattggatcccttataaatggattaatgaattcatggatcaatagattagtgagttaatggattaataggttagcataggaggggaactagtagctttataagaagaggaagagagacttgagctagcatgttagcatgcactgtgtgataccctgcatcatcttgggatgccacagagagtcaccactagcaagaaggttctcaccagctgcatctccttgaccatggccttcccagcctccataactgtataaattcctttttctttataaattacctagtttcaggtattctgttctaaccgacagaaaatgcactaagacatcacctgaccttagaggatgctgatggaatagaatagaaacagcacaggggtgagcataatataataataggaaagagaatgtgttataaattttcttaaagtagtgtgactacctgtgacatttcttacattttggaatatggctttgatgaagatgctaaaaattatcttgccattaaccacaggagaagttcatcaagttctaataaggacagctctaaatctccagacaacaacatagtggattggtatttagaaactttattagagaactctttagttctgagtttgcagtgatgatgcataccagacagctgtagagttgccttgcttctttcctgtggtttgtttcatttctaaatggttgtcctgatatgagactgtgggaacagtacccagtccagatatcagtcaatgataaacaaagatagctgtgtgcagccacagcctgactggtgctagttttttctcgtgtgtgtgtgggtatgtgatgtcacaatctgtcatccccttaaggtattaagtttataattccaaaatgtatcttttaagattttcctgttaagttgaatgttctaattttttaattagcataacagctcgcttaattctacacttgccatacctgtgataagaaaaatatatctagtaactgtttagaaaccctatcggggccagggtggcaatggggagttgggtttaccaaaaacttgaatttgggtcatctgcaaatgttttgttatttataagcaattattatttgatttatgtagtattcctgtgccatttactccacaaaaatgtgttgaatatgtatagttctgaagttctgatgttgccttagtagcattcttctttaatcagagatctataaaattaatatttgaggaaataggtcatatttactggtatttgccaaccatggaggtaattatgccatgataggacaatttgaatttgtaacagtcctgtgaattctgctactgaagtttacagattttagagtcactgattgaatattttcttcttgtataaaattttcactaagtaaaaatgaatttcttaaagcatctgcttctagaaatagtgggaaaattccatttggaatctgtcattgacaatccttttttttttttttcttaacatttatgtgtatgagactttgtaaatcacaacattttccaaatgggtttatgaacttgaattttgctgccttttctcagatttaattgaagagaatggttagcactgattcagtaggagagatgactgtgaatcactcctgatagagacctgaaaggtgattaaacaaacagcagtaaccttaaaaataagcaccgttgtatgttctttcatgatacttcaatgttttgttggtcattcccattgctcaaaacactgttgtataagtgatttacacatttgaaaccattttctcttttacattagtcattaactgggaaaatgaacatgttccttccttttctttcacagaagttttacttaagtacctttgccagtaaccacataaaattctgtgtcctggactaatgctttaaaccacttgttggtaaaagatgaaaaaggaaaatgagaaggtcttaatgcagcagtggattcctagatgtgtacttttttttttttttttttgagacagagtctcacgacgtgtactttctacaccaagactgaatgtactgtattagcagagtttgaataagtacttaaaaataaggacatgtttttcttctcactgtagtacatagagtactttcagtctacctagagatttctaagtttattaagaaaatgtttatcctcattatactgtataattcacaaatcagttgagtaacaacatagaaagcaaatcgcaagttccaaaaacattagtattagtactttagtgcaactatgttggtctgaacatctctagggaaacctgaaaccttcaactgagttccagataatgaggaaactgccctggctgtttaaggggaaataaaacaaaaattgtactcaagcctgtggggggagagaatgccactacaggggcagtaagggagtttaagaaagcaaataaagttccattgacttggctttgctttggtgtttgtatgatcaggattacatacaatttaattcagtgactaacagggacaggagagaattgttaaaggagaatctttcaacagatttttttttaataaaaatgaactgaactttcagagaagtttggtcatatataaccaaatatggaacctgaatatagaaaatgaaacaaagataataaatcagttatgaatgctttttaagctataaccatatgaatatttataaccaatgaggaatattgttactgtaccatataagctttgtttccctagttcctaacaatttaacttttattctagttgcaaccataaggaaccaaattatattgccctgtggtcatcaaataactttgaatctttctgtaggactgactctaccacctaactccaaaatgtagagattgggtctcactatattgcccaggctgctcttgaactcctggcctcaagtgattgtcctgccttgtcttcccaaggtgctaggattacaggcatgagccactgtgccctacagatagcttgcttctaaactgtaactttctaaagagtaaaagccatccatatgaaatttattttcatcaagtcatgatcacttattattatcattctatatggaattctaagataccgttaactctggactatatcactggctgaccttttgacttcatagcttttattaataatcttttagaccttgtttacaaacttttaaatctgctttcagacatttagtttcttcagaaatgtattataggatattctgatctgattttcatatgacaaaatttaaattcagagatgtttctattttccaccccatcctttttaggttgttctattattaagattctgtgtggtgtttactctttaacttagatctcaaattcatttgactcaatagttgatggataaataatattgaaaactatcttcagtcaattgttttgtacaatgtttgtgcctttactgagctagtgttaaaatgcccctttgtacacacacgtacataaataatacaaagatatacatacatattgtttgtatataatggtattagagtattcttttttaaatttttatgggtagatagtagatgtatatatttatagggtacatgagatattttaatacccacgtacaatgagtaatatcaggatgaatggggtaaccatttatcctttctttgtgttacaaacaatccaattatgctcttttagttatttcaaaatgtacaataaattattgttagctgtaatcaccctgttgtgctattatcaaatactagatcttcttgattctatccaactatatttttttactccttaatcatcccctccctgccccaactacccttcgcagcctctggtaaccatccttcttgttaagtgaaacaagccaggcacaaacaaacaaacatcacacgttcttacttatttatgggagctaaaaattaatacaactgaactcatgaagacagagagtagaataatggtattagttcttgatggaaatgtcccttaaagatttttctggaagatttaaaggctggggtaggtaatttaacacttacataacatgggaacagttatcttagtaggtatgctgtcatatccaagaagtttgaaaagctgaaatttgttactcttaaaacagctcctttcacatgttgtcacttttgacaattgcttttgggggtcaacttttcatgcatttattctagtgatgataacagcaatcagaatattattaaaacttttgttttacattactttaccatggtataagaggtaaaaatgaagaaggcatagtacctacttacaggatagttaaaacagatacacaactaaaatacaattcaacatataaccaattttataaaagctacagaaccaaacttgtgggttgtcagaagagaaagtgagagagaaaaacttttaggaagaaggggaggtactgtggcagtcttcattgaaaggagttgaaatttgagctgggtaatatttttcaaaggagagattcaggcaggaaaacattccaggtgttatgcttcttcaaagagggcatgaaagtgaaaaatggtcttgtgtcattgtcactgagttgtttgtatccagcacagtgtctggtgtataataggtgttcagtaattatttgtcacccctcactcattctatacacaagaattaactcaaaatggaccatagacctaaatgtcagagccaacattatacaacttttagaataaaatatgattaaaccttcatgactttgggttaggcaaagacttcttaggtgatgccaaaaactcaagtgacaaaagaaaaatagataaattagacttcatcaaaatttaaaactttgtgtttcaaaggatgcaattaagaaagcaaaaagacaatctacagaatgggagaggatatttgcaaataatccatctgataagggactagtatctataatatgtgaagagatcaataataaaaagataatggaattttaaaatgggcaaatattatattttgtgaactggttctgtggcttgtgacctgtgtggccttaagtatgtcattttgcctcactgggcctcaattaccttttctgtactatgatggccagaaccaaaaagacaaataataatgagaattgaacacctggggttcttttgaggattaaatgaatgaggtaggatccttggcatgaagcaagtgcttgataaggttagctattacagttatgccatgctgcctatgtgtgggagagacagtctgggaccacaggtgttagttcagaagatggaactgtctctgagctctttagtgcagaaagagcttctgcaggaggaggagtggtgtgatattagatggagaggtagagatcacaacagccagcagtcactaactacaggtgagcagcaacatctggaggattttctaatctgtctgggaacatctgggtagttacttgacatcacagcgtgtacctgaaccccaaagatggactccctcttcccagggtgcttcctgaccttggaattcccaaggtcaggcatgtccaggagccccagaaataagccaaaccagagtgaccaccaagaacaaagaaatgggggccatgttggcaggcttcctgtcaaccagctgcttttcctgaatgccaggcatgtgccaggcaccccactttaggtgaggcaaagactttaggtgaggcagagactggccagatgctccacaaaacccatttcctctccctgattacacagcaaagcaacattttccagctcccttgcatctaggaggggggcatatgactagctctaagtcagtggaatgtaggtagaaatgctgtcttccacactttttttttttttttttttttttgagacagcgttttcactctgtcgcccaggctggagcacagtggcatgatgtcagctcactgcagcctctgcctcctgggttcaagcaattctcctgcctcagcctcccaagtagctgggactataggcatgcaccaccacgccctactcatatttgtatttttagtagagacagggtctcatcatgttggccaggctggtctcgaactcctgacctcaggtgatccacccacctcaaacccctgaagtgctgggattacaggcgtgagccaccacgcctggccattttttgttgttgttttttttgaggggggggcgtggtttgagtgtgtcttccacacttctcttttctcatcatttgctggctggttgcaggagacccagtgggagattccaagttcccacaggataacattttctggatccctggatcctctcacggaaggccaactgagcatcttgttggactgtgatgcaagttagcaataaaatttttactgcattttttaaatgggaaaaatcttaatagacatttttccaaagaagatataaaaagtggccaattagcacatcaaaatatactcaacatcattggctattaaggaaatgcagatcaaaaccatgagataccacttcacacatctattttgatggccagaataaaaaggcagataataacaagtgttggtgaagatgtggagaaattagaatcctcatgtactgctcatgggaatgttatatggtgcagccattttagttcatcagtaattaaacacagagttgtcatatgatagagaaatttcatttctgggtttacatacaaatgaattgaaaacatatgtctacctgaaaatgcgcatgttcatagaaccattatttgcaatagccaaaaatggaaacaactgaagtgtccatcagaagacaaatgaataaataaaatgtggtgtatccataccatgtgagataccatgtgagatactactagcccttctcagtgcatcatacgataaaaaggaattaaatgctgatacattcttaatcatggatgaaccttgaaaacattatgctaagtgaaaggagccagtaacaaggccacttattgtttgatctcatgtatatggaatgtccagaataggcaaatcttatagaggtagatagtagatgccttagggctggagtgtgaagcagaatgaggtgtgactactaatgggcacagagtttattttgggaggtgatgaaatgtttcaaaattaggctgtggtgatatttgcacaactctgtgaatataccaaaaaccattcaatcatactttagattggtgaagtatatggtatatgaattgtatcttgatgaagccattgaaaaaaaagtagtgctttgagcacggggggaaaaagagagctatttgttgggtgtgtgtactagtagataaagatcagcatggctagcattatggcacaaaggtgaatgtaggaaaataaatcttgtactttgaaataattaatattttaaggaggcaaaatatgtttgagtgatttgactttagaaactgcgaaagtcagctagatatgcagttccacaaaggtgtgtatattcttcaaccttgtttaagaacaaaaaatagaaataagcaaaatatccctcaataagggacttattaaataaagtataaattcatccaatgcagtattctacagctattttttaaatgaaatcaatctacatgggtttatatgaaaagatacccatgatatataaaccagtaagaaaaatactttatagcatgtagtttatacatacatgtatgcttgaaaattatgcattaaatttttcaataatgcacaactattaaataatggttacttctggggagtcagactgaaagatctcaaagaaaaaagaataacatactttttactttatattcttctttgtaggtgtagatcttgaatttctgtcaagtatacatgcaacttgctttccctccattcctccattaagataattttagacttatagagatgttttaaagaatttccagctgggcgcattggctcacacctgtaatcccagcattttgggaggcagaggcaggtggatcacctgaagtcaggagttggacatcagcctgaacaacgtggtgaaaccgtgtctctactaaaaatacaaaaattagctgagcatggtggcacacgactgtaatcccagatattcgggagactgaggccggagaactgcttgaacccaggaggcggaggttgcagtgagctgagattgcgccattgcactccaatctgggcgacaaaagcgaaactctgtctcaaaaaaaacaaaaatgaattttcatatatacttcacccaattctcccttttgctaatatcttacatgatcatgtaacatttatcaaaataaaggaattaatactggtacattactgttaactttaataacaatctcattcagattttacaattttaacattaatgcctattcttttctgggacccaacccaggatcccatattaaatttccttgtcatgtctcctaagtctttcttgtctttcatgacctcaacacttctaaagactactagtcagttattttgtggaatatcccccaatttggatttggctggtgttttctcatgattagattgaggtcatgcattattgacaaggattgggaagaggtgagcccttctcagtgcatcatactgggaaatacatgatattgatatgtattactggtgaggtttaccttgaccattttgctaaggtgaggtatgccagggttttttactgtaaatttgttatttttctctttgtaatgactatatattttggggagatactttaagactatgccaatatcctgtttctgcttacaaattttcccacaaattttgaaatccactgatggatcttgcctgcagcatatatcactgatttactagtgattttctttttttctcattccttctgccattattaatagaattctataaggaagagttgtcacttctccctcgtgtatttacttattcaattatttatttctatcagtttggacacatggatccttgttttattctgtgtgttataaccaatactgttattattctgttgctcacattgttccagctttggccattgggagctctttcatgttgtgtcctctgccctctcagtttactcttatctttttttgagaccatcaagatgctccagttcatcgggtattttctctgccccagccctggaatcaaccatttctccaggaggatcatgaaatttggatcaagatctttatatttactttcatattgaagaaactgtgtaaaacagagccaaaccctgtgaataaaattggtgaacatccctagcacaactgctttgaacttaaatagattccaagccccacattgattaggtcccagtgagtttcttctttagtgcaatcgatttttttcccaggtttatgagtcataataaataaaaaattgtatattttggagtatatgacatgatttgctatatgtattcattgtgaaacagttaccacaattaagtcaattaacacatccatcaccatcacctcacatagttaccattttgtgtgatgagaacacttatgatctactctcttagcaaatatcacgtgtacaatacagtattattaactacagtcaccatgctatacactgggtccacagaacttactcatcttacataactgaaagtttgttccctgtgaccaacatctcctttcccccaccccctggcaaccactgtacggctctgattctatgattttgacttttttggatttcacatctaagtgagatcatgcagtatttccctttttgtctctgtctcatttacttagcataatgttctccaggtttatccatgttgtcgcaaatgataggatctccttatttatggctaaatgatattccattgtggatatgcaccacgttttctttctccatgtatctgtcagcgagtacttaggttgtcttcatatcttagctgtagttaataatgctgaaatgaatatgcaagtgcaaatatagatacctcatttcctttgggtatatacccagaagtggaattgttggatcatatggtcattctatttttaattatttgaggaacctcctgctgcttttcataatggttgtaccaatacaattgattttaaaattcaagcaaagtctgtagcgagtaagcaaactcctcatcccccctgaccctaccacttttttccttatgaaaagccaggcctgactttgacataagacaaccaattttcgtgcttgtgttctaacttggctaggacctgagagttccaaaaatgttctgagagtgattctaaggacaatattgagttggagggctcccctcttttttaaaacaaaaacaaaacattccttcatttttaaactgaaggatcgaatgaaacactattgccttttcttacttctgaagaggaagatcgttctgtcccttcttatggaatatggtagaatattatttttaaggacttttaaaaaaattattaaaaaacttttatgttccttcgtctctctggcttataaaaagaaataggatgtgtttgcattgaaatctggcaatgattaattaactttctaagtgaagtttaaagaatacagaaaaaataacccatgcatattcagtagtaacgtgtgatagatttctaaaaaccagtgatcacagtttctttccccctctttccattctagtgaaaaagtttttacttcctgctgcatagagctaatataaaaacaccttttcctgaaatattttaaatttccttttacttatttgagaaatctttaattttctgtttgctcagatcttgattgtttttcattctgtttctccccttctgcctgttcatagttcccaataggaagaaaagaagtctcctatttggaattttctttgatttatccttgatttacatggcaaatagaaagcagctgtctatttaagcatctaattcttgaaaccatagtcccctcaagcgtcatctggaaataatgtagcttgtaaaacaaagctaagaagaaaaggcaatgtttgttttatgtgggatgaatgatttctgttggggtcctttaattcggctattatgagggttattaaaaagcagtattacaaaagaggcttaaatgaaaagaattttttaagctggtatcttattattacagttgattatagtcaaagctacaaatgttttataaatgccactttatttgagtttctctaaataagacccccaaaaccagtaattttattcattgtatgagtggaaattcaaccctttccttggttgatttaatttctgaaaacaaattgtattcgagaattcagctctgcttgtttttctggaaatttcacggatttctgacaaattcatgagaagaatccttaacaggagtatttgagaattaccttataaatgcagagaatgaacatgaaaagcatcagactttatctagacttaagatattattagaaaattcactgaacactagataaagttaagtcctaaattgtttcttaatttattcatgaattctttgagtttctgagatagaaatttggagatcttggtaatgggcagtggtatactttgggaagtaggaaggccagttgatttgtgctttgatggttgttggaggtcattccatgattggaatgtgttgattttcttgatttatttgttattacaacaaagcagttattcttggacagttgacatttcagaactaaacaatccttaaatatacttggaattacagaaatggaattacttggcacgtttgtttaataatcaacagggcagtcctgtttaattattttcacacatttgagtcacctgtaatctctcccctaatctcttctatgatcttaaatttgcatcatgcttgacatcatgaggaacattgttgctcagaaacatatcctttgtcctttaataggcagtgctagctaatcagtctggttgctgaatgaatgatccatcttctgtagggccatgttttaagcctgtgttagtcagctcaagatgccgtaacaaaatgtagactgggtggtttgaacaacagaaatctatttcctcacagtccttgaggcagaaagcccaagatggagtgtcagcacagttgggttctggtgaggcccctcttcttggcttccagacagccaccttctcaatgtgtgctcacatggccttttgttagcatctatgttagcagagagaccaagagcaagctctctggtgtcttttactataagggtactaatgtcatcagactaagctctgcccttatcacctaatctcctcccaaacaccccctctccaaatatcattacactggggggttaggccttcagcatatgaatttgagtgggaacacattcagtccataacaaagcctaaacagtactgagcctttaataatcagatatgatctctcttaagtttcatactagttaatgaattccagttagactaacttttgttccattagtagtagtgctttaaacctctatgtgaagtaactcattaaccaattccaagtcctaaatttcccatacccattatgaatgcgctataagttataaacattctccaggttaccagttttaaatagcaattgtgaaagactaatgcaagtataaaaacactttgtgaggctgggtgtggtggctcatgcctgtaatcccagcactttgggagaccaaggcaggcagatcacgaagtcaagagatcgagaccatcctggccaacacggtgaaaccccgtctctactaaaaaaatacaaaaattagctaggcatggtggtgcgcgcctgtagtcccagctactcgggaggctgaggcaggagaatcgcttgaacccaggaggtggaggttgcagtgagccgagattgtgccactggactctagcctggtgacagagcgagattccatctcaaaaaaaaaaaaaaaaaaaaaaaacactttgtaatggtgcttgaaatttcttactctttcatccaacaaatatttagtgagcagcttctatgttctgggcactgtcctctgcccagtgacaataaaaaatctctgctctcatgaagcctctgttctaatgtaaggagggatatataataatttcatacataggtgaatgaatgaaaaaattaataaaatgttagaagataacaagttccatgggaaaataaagcaggatgaagagattgggagtgttgggaattggaaggtagcagtgcatatgggtgatcagtggagcatatatctcatttagaaggtgatagttgagcaaagacctaaagcaggagagggaatgagctttgtagatatctaagggaagtgtgttctcatggaccagtatggtccatgggctgttggaactgagccacacagcaggaggtgagcggcgggcaagtgagcaaagcttcatctgtgttggcagcttctccccgtcactccattacctcctgagctccaccacctgccagatcagcagcagcattagattctcataggagcgccaaccctattgtgaactgtacacgcaaaggatctaggttacacatgccttatgagaatctaatacctgatgatctgtcacagtctcccgtcacccgcagataggtctgtctagttgcagaataacaagctcagggctcccactgattctacatcatggtaagttgtataattatttcattaaatattacaatgtaataataatagaaataaagtgcacaataaatgtaatgtgcttgagtcatcccaaaagcaccaccctgcatccgtggaaaaatcgtcttccatgaaacggtccctggtgctactctaataaaatagagcagggagtgcaaaggctttgaggcaggagcctcacagacccctaacaaggtaatggggctggaaaggagtttatctgaatcttgtttataatcatcttaaacaaatgctaattgaggaatgatccagaaaagttttggatagagtgacagactgagaattagaagacctgagttctgtttttaagctaactttaatttactatgagcttgggcaacttattttgccattttgacccttgattttcttgtatttaacatgtatcttaaaggcttggtgccggggcttgcacctgtaatctagcaatttgggaggctgaggcaggagaatatcttgagcctgggagttcgagaccagcctgagcaatatagggagaccctgtgtctacaaaaaattaattaatttaaaaaatgttaaatatatttttaaaatgtatcttaaagtacattttctattttctttttttttttgttctttttttaaaattatactttaagttttaggctacatgtgcacaacatgcaggtttgttacatatgtatacatgtgccatgttggtgtgctgcacccattaactcttcatttaacattaggtatatccctaatgctgtccctcccctctcctcccacccaacaacaggccccggtgtgtgatgttccccttcctgtgtccatgtgttctcattgttcaattcccacctgtgagtgagaacatgcggtgtttggttttttgtccttgcgatagtttgctgagaatgatggtttccagcttcatccatgtccctacaaaagacatgaactcatccttttttatggctgcagagtattccatggtgtatatgtgccacattttcttaatccggtctatcattgttggacatttggcttggttccaagtctttgctatcgtgaatagtgccgcaataaacatacacgtgcatgtgtctttatagcagcatgttttatactcctttgggtatatacccagtaatgggatggccgggtcaaatggtatttgtagttctagatccctgaggaatcgccacactgacttccacaatggttgaactagtttacagtcccaccaacagtgtaaaagtgttcctatttctccacatcctctccagcacctgttgtttcctgactttttaatgattgccattctaactggtgtgagatggtatctcattgtggttttgatttgcatttctctgatggccagtgatgatgagcattttttcatgtgtcttttggctgcataaatgtcttcttttgagaagtgtctgttcatatccttcgcccactttttcatggggatgtttttttcttgtaaatttgtttgagttctttgtagattctgtatattagccctttgtcagatgagtagactgcaaaaattttctcccattctctaggttgcctgttcactctgatggtagtttcttttgctgtgcagaagctctttagtttaattacatcccatttgtcaattttggcttttgttgccattgcttttggtgttttagacatgaagtccttgcccatgcctatgtcctgaatggtattgcctaggttttcttctagggtttttatggttttaggtctaacatctaagtctttaatccatcttgaattaatttttgtgtaaggtgtaaggaagagatccagtttcagctttctacatatggctagccagttttcccagcaccatttattaaatagggaatcctttccccatttcttgtttttgtcaggtttgtcaaagatcagatagttgtagatatgcggcattatttctgagggctctgttctgttccattggtctatgtctctgttttggtaccagtaccatgctgttttggttactgtagccttgtagtgtagtttgaagtcaggtagggtgatgcctccagctttgttcttttggcttaggattgacttggcgatgcgggctcttttttggttccatatgaactttaaagtagttttttccaattctgtgaagaaggtcattggtagcttgatggggatggcattgaatctataaattaccttgggcagtatggccattatcacaatattgattcttcctacccatgatcatagaatgttcttccatttgtttgtatcctcttttatttcattgagcagtggtttgcagttctccttgaagaggtccttcacgtcccttgtaagttggattcctagatattttattctctttgaagcaattgtgaatgggagttcactcatgatttggctctctgtttgtctgttattggtgtataagaatgcttgtgatttttgcacattgattttgtaacctgagactttgctgaagttgcctatcagtttaaggagattttgtgctgagacaatggggttttctagatatacaatcatgtcatctgcaaacagggacaatttgacttcctcttttccgaattgaataccctttatttccttctcctgcctaattgccctggccagaacttccaacactgtgttgaataggagtggtgagagaaggcatccctgtcttgtggcagttttcaaagggaatgcttccagtttttgcccattcagtatgatatcagctgtgggtttgtcataaatagctttctattttctaatgtggttttttgtgtgtgtggttgtttttagcttcagcattctctcatttcatcatttccttgaggttaccctggatataaagaaagggatttaggatattacttcaagtcagatgctgggagagaaggaggaggaagaaaaggaggcaattagctaatttgaatattacatatggtagggaatcaatagaaaatgacaattaaactaaggggactagggagttatataaagttattcatgtaaagggaactattagaacaaatatataaaccttcctaaataccaaaaaaaaaggtaaaaactaaaatataaaaagaaaacaagtaaaatagaccacatattgaaagactacttgcataaaagacttgaatacatagacatatatataaggacattaaaaacaaacagataaatcttctacctacagctccatcagtaagaatttgttgaataagctttggtacattcacacaagaaagtattataccatgcagctataaaaatgaatgaaaacatctccatatgaagctctatatgccaccacataggcatcctcgggacaggttgatactcatttgtatctgtttatattttggaaacaaataggggaaggacaaactatagaaaaaattgttaaacagttacctataaagaaagtgaagaaattgggtaaaagtgaaagaggaatgaaactcgacttctttgaatattttttgttctttgatgtaacttaagaactccataaatgttttacatgattatgaaacaaaagtttaaaggagcagtgtctaaaatttaaataaattgaaatcagtgaacctaaatatatatccatttggtggcataactgaacatctaagtgactattcctagtaggctataccttaaagacacaattgaaaaaatagtttttactaatgacatttgtatagaaacctttatattgttacttcaagacgggtgtaatgtgagtttaataaaacacattagtaattgtgaaatattctaattttgttttcccattggggacctatatttgtatattatatatataaattatatatatatatatatatatatatatgaatttttttgagacgggatcttgcactgttgcccaggctggagctcagtgtgtgatcatagttcactgcagccttgaacccctgagctcaagcaatactcccgcctcagcctttcgagtagctgggactataggcacgcatcaccacgctcaactaagttttttattttttgtaaatgcagcagggtcccactgtgttgcccaggctggtctgaaactcgtgccctcaagcagtcctcctgctctagcctcccaaaatgctgagattacaggaatgagccctgatgtgcctggcccaggaacctaggttttgacatggaaacattatatgcagatttaaaatagaagagattaactaagaaccctttgatcttgaatttgaataggaagtacctgcatggacttatgcttttgttgttttaatatttatagttatgtctagtcattctacttctgtcctttgaactcattgtaacagtgaccaacccaataacagctttgagcatctgtaacaaccagatttctactaaaaggaactggggatttgtcctgcctttcaaataagatagtaacactagatgtcaaaatagtagatatggagaagttccactttagagaaatattcataattgaaaaagaaatgatagaattagaatatcactattttgcaaaccctaattagtagattcgagcattgagcattagtgactgcaaacttacgtaaagagggaaccatatattatgtttctcctgatgtagaacacaccaccatctatgaagtagtcttgcaaaaaaaaaacccaaaaactaatcagaccaagcctctaaatttagctaccaattttctggggaaacccagaacagagaaaaattaaacatcaccaaaatccaggatgcaagaatctatataggacaaataacctggtttcttcaactaacaaattgcaataagaaaggagagagagaaaaacacattaatgaagaccaattacaccatagagattttatttgaattctcattctgcctgtaagaaactttttttaaaacctaattagaaagttgagcactggctggatatgtggtaattttcagggattactattaattttttatgtgtgaaaattgcattgtgtatattttttaaagaatctttatattttagagatacttaaccaatatatttatggttgaaagatttgtttggactttgcttcagaataaccctggagaagaggaaatgaatgagtataaggaaacaagattagccatgagttgatgggctgggtgataggtacatggaggttcattatactatcctgtctgtctttgtatatatttgaaatttctcgataaagaaagttacagaggttatacagcgtatgaatatgcttggcgtcactgaactgtatactcaacagtggttacaatggtaaattttatgtttatttcaccacaatttttttaagttaaataatatgagtattggaatcagaaagaactatatttaacctttatgtgaccttgaccttacttaacctctctgatatttggttttctcaacagttaaataagaccaatatccggcttgccaaattttatgagaattaaattaaatactgcatcgaaagtacttagcaaaatatttggcatataacaagtactgtgtaaatattagtgaccttaattactaccactacagcttctaccacctgaaagataggaagatatgccctttattctcttatcacctaaaaccaaagcttattactgaggaaggctgtttaaaattctcttttcattgcactgtggcataaaggaataaacttacactgcaagtcagacagacttcactccccattttaggatttactagctatgctgtgttggttagtagttaccttagagaagttactgtgctctcatgtataaagtgagaatactagtatctactttccagaattggattgaatattaataattatatgtgtaatgttcttggcataatgccatgatcatagtaggttttcagtaaatgataggtatgatcatatgattgtattcaaatatgattatcattgttcaggaatggaaagtaagaaaaggtcttttccatatattcttcctgaacgaaattgatctgaacatcagaacaatctttctgatttaattacgggctttagaatatattattaaatggtatctattttctcaattttaaacatttataactttatttaactggggttttatcaatagcaccttatcatctttcctattagggggatgataagttgctactgtgttggtgattgcagcagattaaaaataactggtaagtgatgcccagggttaacctattctttggtaagtaacttgaaaattttataccaaaaaggacttgttgtttaccagatgcaaatagataaagtactctgcctttccctttctctactggagattcaagtccaacagagatgaagtctgcatctaacagaaatgtttttaaaacagactctggaaattttttgtctggaaagagacaaaaaaagaattgattgtagaaaatctgtattctcaatacatgagtaatgtaataacatgcatcctctttttcagaatgaaagcaaacccttcaaattctcatttcttaagtcattggtaaatcacttcatatgtccaagcttcagtttccccacccaagagcaaagactctagattagaaatatctggatttgaatcctagttctgtctcttaatagccatgtgacagtgaggaagttacttaatccttttgagtttcaattctacatctgaaaataaacacaacactgtaattaatttgctataattaattatcttttaaatagagtagatatagtagatgcagaagcaaaatatggaataaatacaaggaaaacatcatccataaatatgtttaaaacatattggccaggcgcggtggctcacacctgtaatcccagcactttgggagaccgaggtgggcggatcacaaggtcaggagatcgagaccatcctggcaaacatggtgaaacccctgtctactaaagatacaaaaaaaaaaaaaaattagccgggcgtggtggtgggcgcctgtagtcccagctactcaggaggctgaggcaggagaatggcatgaacccggggggcagagcttgcagtgagcggagattgcgccactgcactccagcctgagtgacagagtgagactccatctcaacaaaaaaaagaaaacatacttattgattttattcatgtcatattttgtcccagacattgagtccatagcgatgaataggcagtcatggaccttgcctcaagaagctagtggagggaaaataaacatcatttagcaattaaaaatggagctaaaataacagggacataatgcaagagaatcgcaagaatcctgttttagatttagaggcttaggattcaggggtttgctctctgagaaagtgatatttaactgagacctgatgatgaataagagttgccagagaaaaaatgaggatagagtgtttttaacagcatgtgtgaaggcctgaagcaggacggagctctgtttattcaagaaactgttagcaggccagtatagtttggagtgtggatagtgggggagagtagcattaaatgagtatgaaggaataggtcattgtagggctatgttcaaggcctgatgagcccatttacggtaaagagtttggaggttagccatagttcagcataaagtcattgaaggattttgggcactagagtaacctggcctgatgtacctttgaaaaaagcactgtggagaagtgacttaaagggctaagtgttgaggctgggagtccagttgtcaacatgctgagagattacagtggcttggaactcaagaggaaaaggctaggctgcagatggaaacataggtgacatcagcataaataaaatgttcggagtcatggcaattgatgaatgaacaatgggaaggaaagagggataatccagagctctgagagacctccaaccttcagaagctgggtggaagagaaaatgctaacaaaaggaatcagaaaaaccacaagagcgtggtgtcaggtaggtatgtcttaaagtggaagaaatagtgaacaactatacatggaagattgagggtaagatgaggattaaaacacatacattggatttggcaaaacagaggtggtgtctgggcatggaaaagtggggattattttgaatagtataaactgacaagtagctagattaattaatcatgagaggattctcttagggaataggttttttagttgaagtctaagaaagggcatgaaatttattattctcattctcctatttagcctgtcttatcttaggatatgtccatacccctgttcctgttttttagccaacccaactttatgaagttcttgtggagtctaatgataatagataaacttgtttaaaatacaagttttatatcactacattaattaataacagctcataataaaccttatagttgctaaatgtcttgactttttaaaattcgtatcagattttaaattaagttatgcttaataaaccaagtgaaaaatactaaagtcaaagtgtattactatatcttaggttataggaagctccaaatggcctcatcataacactggaattatttccatgagattgcaggatgtatttaagtatctcttacattatataataagccttgcagtgatcagcccatttcaaggaaatactccttgcaagtatgtataaatgtgtttctgctttacaaatgtttgtcattttcctatcaaaaactatagaggaagaggttttgagaactgagtacaaatgaggaaaatgaatgctatgtggcaaaggatgacaactgtgtgtgtgtatgtgtgtgtgtgtcttctgaaaaagctttagactttttttctttttaatgttttatcctagcctttttactattatgttacttatgtagagccctctgtccattgagttcaaagcacttagaatcatcaagtcatttattttttgaatttattgaatgggtgcccattgttcaaaagcctgtgggcgtaagtacagagttataaaagcacgcaaattaaatgtaatggcacaggagtaagagagaaagccagcaggattaccgctgtgcctattgggaatgccacactcttaaaaagaaagaaaagaagagaagcaaaagagaataagaaaaggaaaaaaccaacaacctaggattcatcgtgttctgagagttaaaaaacaaatttgtcagtcaaagggaatgaccatggggtgcagttaagagagtcctaattggatttgcagggcactctgaaaatgctccagcactcacagacccagattttcctctaaaaactaagcctgataaactattgttctgttttcttcattttaatgatagacattcagatataaggggatttgcttaactgccattgtctcaaagcagtatcgtaaatttgaagcatgatcttattctcagattcccagttaattcttggttttgtttctttcagtcatttattttagaggaatatccattacattttagttgtctccctcaaacagtagttttaaaaatggatattttcacagtttagcatatcagtaaaacttagtaagctccttctaaaattaatttagaagagggaatgcctcgttttttaagagtaagaagtcaatagataattgaaaattataaaatttaaaataatagtacacattatttcagaataagaaagcaaatgttggaggaaatagaaaaaatggttcaaagtatttgcctctaggtcatggatttggggaagggaaaggatggatcagagggctgctctttttctgttttaagtctagtaatcttgaatttcaactgctctcttatcactctgataaaaattaaaattacaacaaaagtttaggaaaaagaaaaatgagaacaggaaagctattcctcatgtacaataaatttttgaaatcgttttcaaaactgagcttaatatattattttctaagtattagtctgtacagttaataggttcatcagcaccctccctctctaaagcatagtctaactctcggagagattggctataactgctaataaattatgcattccacaattaggccttttctcctatttctggtattactcctcatttaattggaatttctaatgacgcttgactgaaactcttgaaagtattataacatgaagacttaaatcggacacttcctgtacttctgtattcaggtctcagtctaaatcgtattaatacttacctatcctcccttttctctgctttcatagcatttttcacaattttcagttctcccctactggactctaaattccagttagtacagtacctgttcataatgccactgtttagtatttgttaaataaatgacacatttcatctgggaatattgtggtgtataactgatagctattgggagaactgattaaattgcatcaattagcctgttaatctgaagacgttaataaaacctccccacctgcctagattacattgaaccaaacctaccaaaaccagtaaattacagtgaaacagagactgctgggcaggtattaagtatccatgttatcaaggcccctaggaggtggagggaatattccgatagcaactgttctgggatcttttgtaaaaggcaatttgcaactgtggttttttgtgtgtgcagttaatgcctttttaatttctccctctgtgtctttgcctttcagttttcttattcttgttgttcagcatgtctgattcctcatccaatttactcaaaatttaattgacataaagctgaagccatttagaaggttataatcattcttttatttgtcttgttgacataccaaagggttagagttagcagtgactattgaataataaccagtaaattagttcagatcatggcacggcatgtttcttatatataaatcacatacataaaaaaagaaaaaccccttcctaaacattttgcttgatgaggcaattttattaagaaggcaattagattacacacattggttttatactaccattttcctattctttgggcatagagatttcttgttcacctaactcccagtgtaaaaccaaggggtttttagaactattttaactgatcattggctttattgatgaaatgtggcagagattttctagttgcttctgtgcacatttaggcgcttcccaaggttaaatgagttgtgttcactacaaaacactttctgttgctccctatctctgtgattggtgctaaggtggtgtgtacagtctgtcccactggaactggtgcctgtctcatgacatctctgactttggatcttagggaaagtatggtttgcttttaactaaagaaaaactatctgttatttataaacttagaggacagctgaccaaagagaattatggccaccctttatccaatgctaaattatctacccttattgttctttcttaatattcctactaaattaggggatggcagggtttctagagtcaaaggcaaaaattcagtcttaatcaacatggttgattatacatttctgtagcatttacagttaacaagtcattttcaaattagttctcataaaggcaggcaagcattatatttctacttaacaaaagaaaagaaattctcagattaaatgagttgctcaaactctgaggtgattatttagcagagtcaggtctagaactgaggtcttttgactccctgccagtattctttccatgtcaccaggacaggactgagaaagtgttctgttactacttgccaagtgtgaggcctgtactgagtgtgttatttaactcattcagttctcatggcaccaccatgatgaagtaggtcggtgcaggaaggaaatgtctacttgtcacgttggtcatagcagaagatatgctgtggtggtcagttcagtgtgttctggtgataggattgtcctatgcaaatgttacaaggtccacacattgtagaatcagctgcatcttcattctgtactgtcactatactttgataagaaatgctaccaagtaaattttagctttgttgccattgatactagtatgagtactcaatgttttcttgttatagtgtattcattaccataaaatgtcttttacttgcattctgtgtcttcctcttaacaaaatcttttccttatacccaaaccattatgagtggattaaagaaatgcaatagaagaaaggagggagttgggtagggatcacattccttcttgccaagtaaactttgactgagaacaccctttaatagcattttcctgcatttctacattaatatcaacttttctttgcctcaaaagaagaggatttccttcatgcctgattaagagtatttttatttctggttttatattttacatattgagagttgtttctacacacttcttcccaagaagactctcaggaaaataaaattaagcatttgtctcttccaaagaaattgacaccatatagcaaaatgacaggcagctcccaactcatggtgtaattgattgctagaatacgattcccaagtggagccgttttaagtcagacccttataaatattatacatattaagtcctatccccccagactaaattcattataaaaacacaaaaataggttacaacaaatgaaaagtttgtgttttaaaaccatgtaatcataaaagtagctaaaaattgggatatatatataacatatatgtatgcttttgggttcctttggggctttgaaaatgtaagtccagtgctatttggactgaagacatcttgttatagtaacacttgctgtagtaaggattcttcattacactctaaggactttcaaactgtttttaaaattagtttctgccacaggaaataaattgcaaatttaatacaggattgcctcctaaagttcttgaatggcagtggctgggccacagggagtttccatggcaacctcagtgatcccttgctctaattgtaccagcagactgagttagcttcactgctgttgaccttgactgactcatgagcattagcagttgtttggacaaaatgtaggcattgatgccattcattagacaaccataaatacaacttttggtcatgattgtgaactatagttataatgcagtgaggtttcaaagcaggctgtctccagtcagggttacctgtatttcagcactagacttaaaatattttttaaacatatacataatattttctcaggagattaaccagagtttagtataacaatagcatttaggttcttaaagatctcagattcacagcttagagcatttcattgtaatgtacttaaatgttctaaaattcaaatttcagcctgttggaaacacttctctgtaagaagacattaaagtacaagtcagaaaacgttagtttctcttagtgcctgatagccttcttatacctcctaaatacatctgtacctaataagaaacatttgttattaccattgcttttactagtaagagcaacaatttcttgagctgctcctctgtattaggcattgggataggtgttttgcatgttcattgtctcatttccactcttctgtaatagttttgttgataatgaaatcaaggttcagaccctcgcccacggtcatataagcagtaaatagtagaacaaggattcaaaggcaagtcataaggagcctggcctgttaactcttgtgccacagtgtttcctcttgtatatctggccaatttttcatacaactggggagtctttaatacacagagtagtagctcctgatttgaatctatgacagtagttttttgtgtcttcagtaaagttcagcattcttcaattgtatttgcagtattatttccaagtggaaatagtcattttttctcttttttaaaatgttgtttatttacgtatctggagagaagtggtttttttatgttttgtttttttccgagatggagttttgctcttgttgcccaggctggatcgcagtgacacgatatcagctcactgcaacctccgcctcccggattcaagtgattctcctgcctcagcctcccgagtagctgggattacaggtgtctgccaccacgcccagctaatttgttgtatttttagtagagatggggtttcaccatgttgaccaggctggtctcgaactcctgaccttaggtgatccaccgcctcagcctcccaaagtcctggaattactggcgtgagccaccatgcccggctgagaaaagtgtttttgatagatttctgccgtacaaaactagacaagattttataactccaaggtgaaataaatgacaaggactacatcttattttatgtccttggtatctattctcagtgcttaagacaatgctacatgtcatgatgttggcactcagctaatgtttgtgaaatcatcgtggttattttctattcattttattgtttgtctgtttcaataaactgaggatctgttttgtcaaattttgttaaactgtgaggtagattcacttatttccatgtagaaataattaaatcaagacagcattcgttttatgtattaattattctagagggaactttccttttgaaaataaaaattcctcaagcatattatttggcttttcactaacagttcaaaaaatgcatcctgtactattgcttttctattttaatttgctaattacttgaaaaataaagtgaggtgatatttaatgctgtttgaaacgtaatctccttataaaccattatgcaaaagcttactcctgctgcttcgctagaaatatcttcataaatgtctagattttcacccagtgaagttggatcattggggctaattggtttttttctccaacattttattattaaaattttcaaatatacaaaaaagttgaaaaatgttgcagtaaatgcccatatacctaccacccagattcttcagtaaattaacactttactggacttgctttattaccctctatttatctctctgttcttctatcaatcaatcaatccatcctgttttatgcatttcaaagttagttacatgatatctcattttaatagcttcatggtattgctttgtccagatgtactataatttagtcaatcatctactatcggacatttggaattgtggtaggtataataatagcccctgaaaagtgtccacatcctatccccagaacctgtaggtatgttaagttacatagcaaaaaggactttgcagatataactaaggttatggaccttaaaagagggacattagactggttattccagatgggtctaacctaaacacacaggccctcaaaagcagagaactttttgtccagccaaagcaggagagatgtaccagatggagatctcagagagcttcaaagctgagtggcatttgacttgccattgctggtttgaagatgaaggaggcaatgtgatggggaatgcaggcacagactccaagcttataccagcaggagaatagctctgcagctacaaggaaatgaatgcctctaacctgaatgaactcagaagagattctctccctgagctcccagaaaagaaccctgctcagctgacaccttgcttttggcctcattagatgcggaggaaccaaacctatctgaatgtctgcagaactgtgagacgacaaattttgtgttgttttaagcggctaaatttgtggtagtttgttatgacagtaacagaaaacaaattcagggatgatgaaaattttgaaaattttttgttattgtgcaatagacatccacaaagtaaatccgtgggcatggtcttatttccttaggataaatttctaatattagaattgtagggacaaagagtcttcacattttttaagactcttaagtacgtatttataaatgggtccctggaaaagtagtttcagattatactttcatcagtgctctgttgagaatgccatctcctttcttcttgacaacacagaattataatcatttgttatttttataacaaaaacaaatggcaaagaatgtatagcattataatttaacagacattgtttaactaccagcaaagttgaacatattttaatattttatctttggtaaattgtgtgtttgtgtctattgtacattattcttgcgagttgtttgtcaggaagcccctttctcctactttactaaaacaattttttatatgagaagtgcctattgacttttccctaattccttttcaaaatctattaagatgatcatgacttttttctcctttgaatatttactatgagtacatcaatagatttcctagaattgtactcttccagaattcttgaaattacttggattgtaacccttttagcacaatgttgaatttaatgttcatatgtttgagtattttaatgacggtttttgtttttatttttatttttcaactaactttaccaatttttgaaattatagttatgttacccctgtttaaggaagaacaaaatgagaaacgttctttttctctgatttagaaagcttaaatggcatagtaattatatattccttgaagatataaaggagtttactcataaaaccatatgaacccaacctccttttttaacagtgtgtctctgacagatttttcccttttttcatggttattctcttcacattttttatttgatcttaggtcaagttgaggaatttatagtttcctacacaatttttcctttatttaagttgtcaatgtaaaaaattttattatgaaaaagttcaaacatacacaaaagtagtttaatgaacccccatatctcattaccttgtttctgcaattagattttgtcatatatcctttatctgagctttttatttttcttgtgctgaagtatctttaaataaatcttgagattttactcctttatattttggtatgcatctctaaaaataataacattttctttcataatcacatatcattatcacatctaacaaaattagaaatatttcctaggtataatctaatgcacagcatattaacatttctccggaagtctcaaaaatggctgttggcaatgtgttaaaatcagaatccaaataaaattcacacatttggttgttgtgtctcctgtctcttttaatctagagcaatcctgtctttcttttttctcccatccaattatacggcagaaattgaaccatttgtcctgtagaatctttcacattctggtatgtccttttgtttccttttggtgtcatttaccttgttctctgtccctcatatttactataattaaagttagctctaaagtcttaaatagattcagattctcctttcttgttaagaatactgcatagctgggtactatttggttcacaaatgagaaggtatgattgtctcactttagtgatggttaagtgttatatactaaactgttttctccaaattaatatgttgaagccctaacccccaataagactgtgtttggagacaggacctttaatgaagtaattaaggttacacaaagatgtgccccttatccagtaggggtggtgctcttataagaagaggcagagactgggcgtggtggcttaggcctgtaatcctagcactttgggaggccaaagcgagtggattgcctgagctcaggagttcaagaccagcctggctaacatggcaaaaccctgtcactactaaacatacaaaaacattaaaaaaaatcagtcaggcgtggtggagcaagactgtgcctcaaaaaacaaagaagaggcagagacaccagagctcacttgctcgcttgcttgctgcttacagaaggccctgtgaggacacagggagaaggtggcatctgcaaggcaggaagattgaaatgtcctccatgtctgtagtcacattctctttgtcaccttaaagttggatatttgtgtttttcctccttttttcttccttcttgtttcgggttagcattttgtctgttgtttgtggtaagtattataataaccaccaagtaaggaacactctttatctgctacgcaagaccataaatagttttaaatacgttatttaatcctcacatcctctaaagtaagtagttctctcatttttctcacgggaaagctgaggctcaaaaaggttcagtgaattgcccaagggcacacagctaacatatggtaaagctgggattcaaggctgactccagggcctatgttcctactatttgtctatgtcctcctccccacaaaacccccaaccctattccaagtgctcccatagcgccttgtactttcacagggtgcctctcccctaaatggtaacctgtgtgagggcaggaacatgtctggatccccactccaacccagcatctgccatagcacctaccaagtcatacagtccattgtataattctaggaaatctattgatgtactcatagtaaatattcaaaggagaaaaaagtcatgatcatcttaatagatttgaaaaggaattagggaaaagccaataggcacttctcatataaaaaaaaaattgttttagtaaagtaggagaaaggggcttcctgacaaacaactcaaaagaataatgcacaatagacacaaacagacaatttaccaaagataaaatatggacttatggactcaggtgtctcattttctactgaatgccggacattgtgctaggacattcgaatccgaggttaaaagcatttatgcctgtaaatggggagacctttgcttttagactattaatgggagttggttccttcttgagcagagttgggttttgtgtcttcagtgcaccaccagcttcagattcccctagcagctctttattttatgcttaaagggtggagtctgcagtgtcagagggcttttttcagtgtttctttactactccgttttcagcagtcccagcagtagggctggagaagagacctctctgttgtcctagtccagcctcaatcctggagagtccctgtgtgcacctggatctcagaagtagacctttctctgcattcctgtcccttctccagtggtagcagacctgtgcttgatattggtatgcgtataggatcctgaacccaacttggtttcctgcctcaaatcccagaactagaaagttttttgcttttattcctctatcatcaggattggatctttatctatgtcctggaggtgagagagcttcctacctcttgttcaggggcagacatgtttctaccatccccctagagacaatgaaaatttgcctgtgctacaggccaagagggtttgctgccctgtagcttacggctttttcttagcatgagagaagagtcagggaagaaaatgagtcttggagcctgcccccagcagcagttatcacctcctgcaagcttgagcagtggtagaggggccctcttcagtcgcctgctccataccagcctttctcatgagcacctagtagaggatagtgagaaagaactcttaagtgaacataaaatctcttgcatctgggtttcaggtttcaagactgacacattagcctttaataattcatcaacattttagctgctttcttctttgccacttctgtggacaccacttcttccttgcatgctcagccaaaggtgaatgtttgtgttccttctttccttagaagaggtacttgaccctctttggaattcatttatctggttgccttgtgaaatcatattctgatgaacttaagaagatttaagatttattaagttacctggtttttttctcctcactaaggagggtcgttctttgttactttgcacatcctacacggaaactgaagtccaggttccttacaatgtgtacacacgtgacctagagagcctatttatcctacatttgaaggaaatgaggcctgtgaaagtgacgtgccctgtccatggcaaaactgggactagaacccaatctggagcttctctccatggacttggagctactctgtttttctttttttttttttttaacttgagcttattacacccctatttgtgaccctttactgccttttttggcatcactgactcttcttcccaagaaagaatgaaaaaagggcatcaagcgtcataggtctctgaagtcaatgtgtaatccatgacacacaggtttacagattatttcccttctgtttattaagagtatcaaagataaatagcatatattgaaaacagaagaatcaataggttccttgggttggagaatgattattttgaaacttaactttgtgcatttttacttataaaggtttttggattttcttcttcttctaaaaaccaataatgactctattcatggtggcagggtaatctaaattctgaattttcctgaagtttgaagttaccctgaatacgtttctattttaattacattttttggttatattaataaaatttactttccaaattcagtattgtctaaatactttatgaagctgagacttgagactaggaaggggttttaaaaaattatgtaagtacttatttttgcaaataaaaactgtaactcaggtgatgtagcaaaggtcacagctaattattggcagtgctgggactcctggatctcagatttgggatgagacaaggcactcagtagaaagtcaaagactttttttaaaaaagacacatcttcctaaagtattgctttacttagattttacttttcgtaggctgtggaaagggatttctttttctaataaaacaccaatatagtctaagaagaataaaaatgaacactaatacttaaggtaaaacattgaacttttaaaaacagaacaccaagctctggtacgcacttgtctcttctgctggcagtgggcctgaggaagggtgagaaactctattctgcaccccaagttctgtccactgcaagtggcctgctaacataatctgattgtcagaggctgcacctttgctggatttcaatcagaacactctttgtatgagttctctggctcttctccggatgtggaaaaacgtggctttagccagtgtaccctagcagccacagttctcttgtcactgcctccagtgcctttgcagtagtgtatgttaaagaacgactttccagagtgttgtggttgaggcttgtgggtcacattcaaaccacatccaaggagtgtagaaaaagaccacatggttttacatccccgcatgagaccagtggtgcggtgactgctgtctgctcaccgcctccccctcccactgctttattaaggttacccattgtctttttaggtcacaggatttattcttcagctctgattttatgtgtaatataaaacctgttctttctatcagaagctcagtattttggacaaatccagttctggctagaaataacatggccacaaagctttccagtgtgtgcaccagtgaattagcaacgtaaagataacaagagtctgtcaccaagtgattgcctttgaaggccattggcgcattaactttaaagagaactttgcttgtgcatttcctccccctactccccacttttggcaaaatcccattaattttgttgaaggttttattttctgctgaaaatgcaggaaatttagacaactctcttggaatccccccaaaactaatacaaacaagatacatatgcttctcttaaggaaactaaaaataaagatttgaaactatttaactgtataaattccctcttaaaaggaaaaggaagtttatagaatgagaggcaactctgactgctgttaacaaggtaaaatattcccacaatggccaacttctctatttgatatgaaattactacttcgcatagaatttgttgagctttcattcccaacatatttgatgtatcagaaacatctgaaaatgggatcattttcttgtttttacgtttgaaattgtctgcagtaaaataagtatgcccattttttggaggagaaagcctgtctgatatgagatctgttcctgttacagaagctgtaaggactaagaggaaaataccatggctgctccattgatgagctagcagattctattatggctgctccattgaggagccagcagattctacctctgacaaagctaattttgacacaatactgaggaaatacggttagttttcaaaagcgtgtcttccataaaatcttatttcataaatgcaagtcagtttttctatacattgactacttttataaattaataagagtgggattttggacttacatttaaaactaagaaacatgagttctgagttctttgcacttatagtaatttcaactttggaaagccatttatattttttatgataatgtctaaagctaaaatgatttttctccttcaaaatacttcgaaaatatgtttgtggatgttttggataacactcacatagtgcttaccatgtgttacacacagttttaaggactttacaaatgctgcctcatttaaaatttatgaaaaaaaaatcaaataatattaaataccatttgaaattctgacacccaaatcatgagattagataacattttaggtctgtttaagtactgaaatttggatggttttgtaattttaaagaaactctccaaattcatgatttttcttctttttacaagtggtgattataacccaataatgcttttaaaaaatgaaacataaagaatttcatttattaccaaggatgtctgaaccagacatctaatcatagtagcaagttgaagattcaagtaactgggaaattatagttgttgagatagttttccttagaaattagaattagtcaaaaatttgatactttgtttttagtaaatcagaatctcagggtacataatttacccctctggctcctgattatttcatgatctgcttggtgccttgaagctgtagttgatcttccaacaccaatgggaggatccagagcatggtttccaggaaacgacttacacggtaggaattctggctgttccctaaaggataattaaagtagtggttagcagagaactgttgtcacttaaaaatggaaatgaattagttgcaaggattacaaatgtataaatacttatgtatcttaatggagataatggaatacacagcattacatctatgatcaaaacaatccaaatgctagacatctagcaaagtgcaaataaaatgatgagaaggctttaagccaggttgtattgagggacacttgaggttgctgatgggcttgagaagaagatgatagctataacagtggaatagactgaagactggcgagtaggagtagggcgacagacttctgccaaactgcaacagctttctgtactgcatagaaagaatgaggagcctttcaaaagtgttctgtattcaaggatgggctggttgaccacatgggatgaatgttatagaagggattctagcattaaggggagtcactttagtgtcttttgtatcttctgagggtgttttataattttacgattctttgaccaaattctaagctttctaattggatagatagtaactgaattagtagtaaattaaagaattgctgaattgaataaagtaatgcacgtagaaattcttggtatagtttttggactataataaaaccaattaacgtagacctgacttcaaggaaacttcattttatttttctttcttgaaagagagtatttatgtcactactaccactgacatccagccaatgcaagctagtagggctgccctggttgtgctcaacctgcatctactaggactagcagtgccaactagttgttaaatatttggaatttcacgcctgggtataaccagaaaggaaactattctttctgtatagggattctttatattgaaattttaataactttatttatttatttacctttgagacagagtctcactctgtcacccaggctggagtgcagtaggcaatctcggctcactgcaacctccgcctgctgggttcaagtgattctcctgcctcagcctcctgagtagctgggattacaggtgtgtgccaccacacccagctactttttttgtatatttagtagaggcgaggtttcaccatgtgagccaggatggtctcgatctcttgacctcgtgatccgcctgcctcagcctcccaaagtgctgggattacaggcgtgagccaccgtgcctggcctaataacttatttagagtgttacatattaaagtaaatattgacagaaaattataattagccactcttcaaacttatttctgaattatgttattcatttttgtttttcaaaatagttgtacattaaaatacagaagattctttctagcatggcagtccagccaaatacaatatcatgtaaaatgtgtttgctgtaacctcccacagtatattgttagccaatttgagtaatgctagaaatgatatgttcttgtcatttaatttataaatctgcaactgaatataatctataaaagatcacattagaatttgtcacagaaacaatgtaagagaagtttggtaaaatacccaataactctaaaaataagagggttagtgtaactcttaaagagcctttagtcagagtcatgcaaagtaaaaactaatgtagaacatgcttattaatataaagtttcttttttttttttttttgagacagggtctcactctgttgcccaggctggagtgcagtggcatgatcatagctcactgcagcctcaaacccctgaactcaggcaatcctcctgcctcagcctcttgagtaactgggactacaggcatgcaccaccacatcactcctagctaatttttaagttttttatagagatggggtcttgctcagttgcccaaactgcttttgactcctggcctcaagtgatcctcctgcctcagtctccccaaatgctagaattacagatgtgagctgctgtacccagcctcaagtttctattttatactttccctgacttgggaataaaataaatagtcagtattttagcctgggtttaaagtagcaggtgcctagttaggagttgggtgtatcaccctgtttgtttcagcaaattacttatttaaacattgagaacaaactctcaatgtgtttgaaagcagaaattgtaagctatctgcagataatttttgaagtataagtttcatatatcagcacttatacttagcataagtgagtgtataaaatatacatgaacataaaattctacagaaagctaatattttgacttgattatatttctaaagtagtcataccatttcattgggttgcccttaaatgaccgtgagagagaattctgaagcttgaagtctcttccttctatactaattcaaataccaaaatgagaagcaaatataattcagaggacttctggtcaagattatcttgttagttccaaatttgaagtctcatctcctcccctttgcttcaaaaacataacaataatagatgaatcataaaaagaaaacattttaaacacatagccaaatcccaaaatgagacagctatttcttgatggaacagaagcagaaaaagcagtcagaacagtgagcctgctgagctggaaggaggagaagtggttgggagctcagctactgtaggccagacactagtgccagattccctgctagaaattaggagctggaatagatgctttattgaaataaagagcctgaatgaatgtgctaataataacagttaaattatatgtctagggaggcaagagtacacagaaacagcctcaccatgggatcttgaaacaaactgatactggtatggtgataaacccggccagtactgtctttagtatgattgcagggcaggagcaccgaggcaccaattatgagacctggtttcagtctgagactctaggaagccaccacataacctatagatttggaagtattaagccatattagataagcttgcataacaaaatacatgcggaaattaacaatagaaagatagcagtcatgatcataattaaggtaaatttatccaaataaaattaaaaactaatagaataattttgaaaatactttgagtagcctcaaagataaatgaaggaacaatattcataaaaaagaataaataggaaataaaaacagaaataagtaagaacatgactgtgagagagaactagttaactagaaagcttaaaatgaaaaatatagtcattaaaattcaaagctcagtaagcaacagtgatctatactggacactatcaaagagagttaataaattggaagataataattagaaaagattatccaagttatctttatggaagagactaggttgtcaggtcaaaatgcactccgaatatactgagcaagatgaataaaaataagccaatacctagacttgtggttgtgatgctgaagaatataaagcagcggtccccagcctttttggcaccagggacccggttttgtggaagacagtttttccatggactggttggtggtttcaggatgattcaagtgcataacatttattgtgcactttgtttctattattattacattgtaatatataatgaaataattatacaactcactataatgtagaaacgaggggagcactgagcttgttaatctgtatttgcagctgctccccagcattagcatcacctcctcagttccacctcagatcatcaggcattagattcctgtaaggagtgtgcaacccagatccctcacacgtgcagttcacaagagggtttgcactcccattcagggagatggtcactaaggtagtaacagtgtatttctctgtatctttcaggtagtgagttttaaaaagaacaagtatacctgctgttggtgagaaaatggtagaaggccttcctacattgctagtttaagtgtattgtcatcaccgtaaacaatctgatggcatctattaactttacaaatacagccttttcagcaatccctctcctggaatctatcccagagacgtaaaagtacccatatataacacatctaccaggagacttatcagccttattcatagaaacaaggaaactagatatatattggatgtccatcagcagaatgttatgatatattttacatgttttacatatatatgctataaacctataatacatctctactatttttactttataagtcagctctcttttagaatgattaaaaataaaaatatctcgcttcccttgtggacatctacatttctgtctggcttcatatttcttctgcctgaagaaatacctttaatattttgtatagtgcaggtaataaattatctcaacttatttttatctgaaaaagtctttttttgaccttcatatttgaaagatatttttgctgtgtataggatacttggctgttatttcagtgctttaatgatgccactacatttaggttggactgcatcggttctcctaagtcagctgtgattcttatctttgtgcctctgtatttaatgtgtgtgggtttttttgttttgttttggttttagctgtcctcaagattttctctttgtcttggtctttaataatttgaatttgatggatctaagtacatgggttcttttggtttttgtttgggggtggagtgaccatgggtattttctgacgtgcttgaatctgtttgattttttttcattatttataggaaatgctcagtcattatctctttgaatatctcttttgtcccattctttctctcttttccttctgggagtcaattagatgtatattaatgcatttcttattattttacagcccttgttggattctctgtcttgttttcttactctttttttctctttgtagggttagtttgtgcaatttctgttaacctgccttcaagtttgcaattcattcccaagctctgtccagtctattattgaaacctatttaaggcattcttcactgcagtcaccacattttacaaaatttctagcattaccatttgtctctttcttatagtttttaactctgctgaaattcccaatcaattcaaacaaattttgtagatcacagttcttttatattccctctttgatattttcagaatgttttatctctgtgtcatattctgctgatgactttgttcaacatggattcttttacttacttttttgtgtgtttcatacatttcagttgaatgttagacattgtatttaagaaaacagaggcagaggctgggttcagtggctcacctataaaatcccagcactttgggaggcttagatgggagaattgcttgaatccaggaattcaaggctgcagtgagctagggttgcaccactgcactccagcctaggtgacagagtgagaccctgagtcaaaaaaaaattaagaaagacagaggtaaattgtatggaaataggcataccttttcatctcttaagcaggggaagtaaactttttctgtaaagagccagatagtcaatattttttattttgtaggccagatagtctctgaagtctactttacctgatactaatataagtcagtcctccatattttgagtgacacatgcacagattcaaccaacgcagattgaaagtacatacagttggcccttcatatcctcagattccacatccacagatttaaaaaatctgtggatggagtgagcaactgtagtatgccactttgtataagggacttgagcatctgcagatttttggtatttccgaggcagggggatgtcctggaaccaatcccttaaaggtatggtatactgtatagccactcctgctttcttttgacttacgtttgtgtaggtatctttttccatccttttactttcaacctaactatattagaagtttctcatagatagcatatagttgggtggtgtgcttttaatccactctgccaatcctcagattttaactattgtggactatttgcaattaatgtagttattaatgtgtaactaccattttactttctgtttttagttggtttccctttttcatttgcattttttctgccttcctgtatggaaatttttttagaatcccattttgatatatctctggttctttttttctttttcttttcttttttttctttttttttttttttttgagacaggatctggctctgtcactcaggctggaatgcagtggagcaatctcaactcactgcaacctccacctctcaggcttaagccatcctcccccctcagcctcccaagtagctgaggctacagatgtgtgccaccacgcctggctaatttttgtgtacatggggtttcgtcatgttgcccaggctggtctcgaactcctgagctcaagtgatctgcccaccttggcctcccaaagtgctgggattacaggcatgagccaccgcagccagccttgatatatctatagtatttttttttcctcaggcagatttgctctagacattacattatatgtacatagcttatcgcagtctagtagtgttgatattttaccagttcaagtgagttgtagaaacctttgtccttttaaatcccttaaccacctttgttgataattgttttagatattcctttacatacattgagaaccacatcaatgttataatttttgcttcaactgtcaaatatattatggaaaactgaagaggagaggaaagtctgttgtatatacccatgtgcttgctctttccattgcccttttcttccaagaggtttgctgattgcttactttgagctttactgtttggcaactattttatgttcagattcccaaagactattcattatgaggaaacagtgacaaaatcatagtctgtttatctgaaatataaagactgaaatgacagtgtagagaaatgaagtcatcttctgaattaggcatttttcttggaatgggtacaaccctaccactactctacatcatggaagtcttaacgatttagggtaatacgataatgagaataccaatatggatctattaaatgaggagctgagtaagctccaaatttccctctagattggtaagtctataatttattatatgaaattcctaattattaccatactaagttcaaaagattttaacccaaatcctttagtaactgataaacctcattcttaagattcttgacagaaataatcttgatgagcttcttctcttcatgatctttccaatgctgttataattttgagggaattactcttattttcattaattctgttgcaaggaggaaaagactgactctgtgttggggtttcttttctctataaggcacaagacctaaatgtcattgaagaagtgattcgaatgatgttagagatcatcaactcctgcctgacaaattcccttcaccacaacccaaacttggtatacgccctgctttacaaacgcgatctctttgaacaatttcgaactcatccttcatttcaggatataatgcaaaatattgatctggtgagtgtaaatgaagacatttattatgattcttttttaagtattaaagcagagaatgtttaataagccttggtaagaactataatagtaagagtttcttctttcaacattaactgtatttgcagtctattttactataatagttgtggtaatctgtgtgtgtgttgtatatacacacacatacatatttaatacaattgaagtcatacttcatacagttttttattctgacttttttactttacacttagaccatgagcatttttctgtggtattatcaattctttgaaagtctcacattttaatttctatctagcccatgtttgtgtcctaaaatatatataactattatcccatttttgctcatttatttccagtattttatatcaattcataatgaatgaaaagtttataaataagtcttatctcaaattttaaaattatatttttgatatggttttaaagctggaattttactagtttttactgtcaaaagatatctttattttcaagattcaacacaggttgccaaattgctttccagaaaaactgtagaatttatgcctgtgggccgggtgtggtggctgatgcctataatcccagctacttgagaggctgaggcaggagaatcgcttgaacccaggaaatagaggttgcagtgagccgagatcacaccattgtactctggcctgagcaacgagagtaaaactccgtctcacacacaaaaaaaaaaaaaaaaaaaaaaaaggctgggcacagtggcttatgcctgtaatcccagcactttgggaggccgagatgggcagatcacgaggtcgggagatcgagaccatcctggctaacacagtgaaaccaaccccatctctgctaaagctactataatatatgttccatcaacacaaagtagtaaacaaagaaagacgaagacaaaggagccaggcttaaccaaaggagagcactgaaggcagttcccaagaatacactgtagtgtgtagaaccagtgcacagtgggtgtggcaggtagcaggtctccatagaaagagcagatttgagaatgttacttgatctgtttgactatttagagaggagttttagagttctgttaaaaagtttgtagctgtgttagagattggatatttgcaacatacaaccaagaaaagtctagaatctagaatataacaataaaatatatattaataatagataaataactcaatagaaaaactaacaagaatcgaacaggcactcccaaaagaggaactctaaatggctaataaagatatgaaacacataggatgtattaactgctggatactctggaatctacacaattaaatgtgagtttaacctacagttgagtatactgttgcaaatccattcattgattttcatggctttttcatgattgctggtaaacagaaattaatattaaaactcttctgtcagcttaatttcattggctttcgttaagctgcttcaactatatacctaacggttgcagctatagcaaaatattttgccatggacactcttgtcactttcctaaacttatatcgacatcatttaggtatcattaacagaatcggggaatttgggtatagttgccatcagtgcaatcaagataaagcagaaacaccatttcacacaaggatgtttattttaagaatcaaactttgacattttaagggaaatctttatgaaccaggactccatgtagcttcactgatatttaggatgtgtgtgagagcatccttagcaacttctcgattatttcatctctggccacatgtccttcttgttaactctgagttttaattaagaagtattggtgttaataagatctctttaaaattgagaagtgtcagtgttaataagattatgaaacaaagttttgcctaaggaacacctatcacgagttaactccgtcttcttttatgggatagattatttttgacaacatggtaaattgtggtttatagtctaagaattcctgttagttttatgctttgatagaagatgataatgcaaaagtaccagttattaaggaaagtaaagagtccatgggggctgaggggtatctcatgggagaatgccatccctgctgtcatctcagctctcaaagaaactatctggaactcaagcagggcctttatccattcctcttaacagttattcctgcaagcagtcttaaggattataacattcagtagaaatcgttctctgtatgaaggcaactttataggctagctgtttacttacttctgaaaagctttttctaaccatgttattcatgaatttgtccaaattcatttctatttcttcccagtagtatttttggaggtaaaatactgagtttaagactcattatgcttgtgggtaaaggtttcacaaaactctttccccttttacatgagaaattggccttgggttaagatgcttctagctcagttctctagaaatctaatggaggtagaatgtcagttgtgttaccaagcaacactgctatgataaaatgatgatgtgataaaatgacatttgattggtaagctgagtcattacttggaggactacgaatgaactacaaatacttgatgagaagccatcactttgggcttctccgaatgagagaattcttataactgggcatgtcctttacaaggacgtagaagctgagactgtcacaaggatattggtttctatttgagacatggtttctaaggtagggtggctattgcatctacctacagtagtctcattctcttgcatctgagctgtcatttgaagggtcaaagactagcccaaaaactgctataaggattcccaaggaaaacaaaaacctgtgagactatgctgttggcatgctgcttttcctatccttctatctttttaaaattaatctgatgcaaagtgtggccttttatagtcttgagactcttgatgtctaatatttcgtctaagaatatcacccaagaatgggcactgtaatattaaaatagtattttcttacatttgtttattaatgtatctctttcaagctccaggagatattcctggttttccaagatttattcagatctttacattctagaaatatccaacatgtccattttcagtcttcatgtttctaaactgtgtcatcccattcatttcagtctgcccttgtggcagtcctctatcccatctgttctaacttttacctttctctggacctccctcattccaatttcttttttcattccttcctatctttcttttttcctttaaaaaaatgtttaaagatagtcacctgaactatggactatgtatgtctgctaatatacacctgcagtaaatgggagagaaataatctctaattcccagtacctttcattgtgataggcaatattttctttgtattcctgacaaaagactaaaccagagatttttttttttccctgtggtcatagctgcagtagctgcaatattacacatcatttggagtatttagctttaacattttatttaaaccacatcaaaagccatttgcttcttttctaatcatcactagcttttattgcatacttgctaagcacttacgtgcaataacttacttaatcctcattaaaaaataaaccatgaggtatatttcattttagccctcaatttacagataaagaaaccaagttagaaagattaattaacttgtttactgtcacacattcagcaagtgatacagcgagaacttaaacccagagtttgatgataaggcctttgtttgtaataattctgcctaaccactatacacattcactaaatgctcccacagttgcctatgaaaccatctgatcatatccacaaacctaattactttctctttcaaaatcagttctaataatgtcaaatcagtctttattccatcagtggtgcaatgaggaacgttcttagtaaccaggcaattgatatccttaaaaatgtctctgagagccaggcgtggtggtacactgttatcccagctgctcaggagactgagtcaggagaatctcttgagcccagaaattcaagaccatctcttaaacacacacacacacacacacgaaagaaaaagaaaaaaaaagtctctgaaagaccatattaattttttttaatcaggacacacagaaccatgcaaagaatttaaactacatccatttgaaacacattctcctttggaagaagtgaaaagcagagtggaggtgaggaagtagaaaggacctcactgtaagtacacagtatagaaccatatagaagtaaaagcaggatgttaagttggacttatacccagtgctcacttttctgtcattgtcggaataatgggccacttatttacacttcacctgtatgcagtgaaaactgcattctcaggctaaacatttgactatatgctgttatgcagttcttaaaaccacataaacaaatgcctaaacatttttaagtacaccttctaaatgatgggaatgaagcttgagtgcctcatgtatatgacctcttttaccattcttaatccatgtgagctaggattattatcccactttacagataagaaaataaagatgctgagaggtttctcagatgctattaatatacattcctgcctaaggatcattgtcttggatagttatcacatgttattgcagggggctttatgtcattggccctttcgccatccctaggaggaagggagagcagggctagagaagggaaatagtaggcttgagatcacttagctagcaagtcagtcaaccaggccctgaatccaggttctcattctattaaatcccgtgttttcagcattcacttggataaacctaattaagattccaaatgagcaggttttccaacaactttttgttgaatactatcatccaaaatagtgctgggcacactggaaattcatttaaaaaacattttaaactccttttacatattttgaaaagatgctgtgataaagatataaataacatctctactgtgtgcctttttcagtactttaccttccccatctatcccccaaagatccctgaaattttggcttaaacaagcttttgctactttcttctttcatagagttaaccttcagaagttaactctgtgaaagactgtagaagaaaaaagttggtggaggagacgaatctactgttatttttagtgggcagggagttgagagttgattatttttggttaagacatttagcagcactcagtatctcagaagacagaagtggctaaccttggagcacttttaacgtctgcagaaggaattagatagatgtttttcaagtgcctacatttttattacacactggtgcctatctcgcccatctaaaacataaggtgatatgatcaggctgaattaagcagcaagacaaggtagaatatgacaccaaacaagagagaacataaaataaattgtctggttacctaagaaatggctgaatatgagtagaggacagatgcaatgaactataaccattgtatagtaaggtacaggcaagaaatcttgttatctctggacattagatcttgtgtatttccagacctgaccatccttatcaagctctaaactagcactttaggctactgacttgacagtcccacaattgttaaacaaggttaaatcataattcttgattttctgcaaaaaccaatgcaatataaaatattttcttctatagtctttcttatcccaatatatgacatcaatatctacccagttgcttaaggaaaaaaaaaagagtaagaaaggagaataatgagagctcgttagaataccggtaggagattgcagatttaaagaatgtaatcaggtgcgtttgagccaaaacttgaagcaggtagagagtgagctatgcagctatctggggacagagcactctaggcacagagaatagtgggtgggacggagttatggggaactggctgggaaggtggagtgaacattctgtgataatgaggggcagatggttacagggtatgcatatttgtcaaaactggttgaactgtaccattaaaatgagtatgtttattttattgtatgaaattgtacctcagtaaatttactactaaaaaataaattccctacagtggacttctgcttaggatatagaaagctaggaagagttctaccctaacaaagagaaaaagaggtaaactacaaaatcataacttttcttgaacctatcaatgagctgaggtcacaggacaaccaaatagtctagatcccaaggaggggtcatcggcccacccacccctcaagttgaggtgagacaccaggactggatcacctgtggcagagcacaggggtaggtagccaccatacaagtgggtaaaaagaaatcagatgcaattttaataacttgctaaaggttgagtgtggagtagcatgacattacagaacacccaggagacccaagcaccagaggaatttgcactcacaggctgttttccactgagactgggggcacagcaggaagccagagagcctcccaaggtgatgtaccaatagaaaaatgcgtagcatcattcccctgccagacctttctttcatatggtgcaaaagccttagattgctggcaggggtgggggtgcggaggggaggggggtgcggagaggaggcgggtgcagaggcaggcaccaaaccttgttgccctcggggcataggtagagacccattattgcacgtaaaagataaaacaaaaaaactctctacttctgggtaaagggcaggaaactgtcgcagccccagggttctataagagtaccattagaggtatcctaccaacaactcatcacagatacagggcaaagtctggctgccatcggaagaaagggaagagaaagctaagaaagccttatgccctaggcccaggcatagagagccccatttaagactgaggtcttaggacagcacgtagagaatcccctaccttctgccaccagcctagcaagtactgagtaacaagcagcagcatctgctgctgggaaagatcaagggcatggatacacaccctgctctgggacccaggtatgcagaactcactgaaagcagaacgtggagcatgaacgttgaaaaacctgtggcacttcagatcccagcaaagcacaaggcatcattagaggatgtggtacactgaaggtagccacagcaacagcaaaactcaaatttagctcaccttctgagtgaatcagctcaacctccaagcctgacctaagaagagatgtgccctaatttatcataaatagtatttctgtcagtctctacagttctacacatgatgtctaacattcagccaagcattatgagacataaaaaggcaagaaaaatgtaatggtggcaacagacccagactcagtgatgactcagatgttggaactgtcaggctgggactgtaattatgatttatcagtttcaaagatctggtgtgaaggtcaactaagtgggacccatcaggcaaatgcagcccacagcttgcctttgtacagcctgtgaaatacgtatgttttttacatttttaaagggttgtttaaaaaaaaaaaagaagaatatgttacagaaactatattgggacccacaaaacttaaaatatttactacctggttctttatagaagacatataccaacctttgtcctgggggaaaaggtgacaacatatataaacagttccagagagagatgggaactgtaagaaaaaataaaatgggaatgctagaagtaaaaaacatgtgacagacaaagaattgctatgactggctcattagtgggcttgtgaaaaaaatctgtgatcttgaagataggtcagtagaaattatgcaaataaatacaataagaaaaacatgtgaaaaatgagaacctatcatccaagagctataggacgatatcagatgattcaatatacatataattggagtctcacaaggagaagagagaaagaacaggtcagaagaaatatttaaagagataatagctgagaattttccaaaaatactgacatcaaaccacagatccaggaagcccagagaaccccaatcaggataaatccatttttttaaaagacattatatttaaacatctgaaaatcaaagataaaagaaaaaacacagtcttgaattcagccagagaaaaaagaaacattatatacagaggaacaaagatagtaacagcagtttacttggcagaacctagctaggcaagtcagataatgaagtgacatctttataaggctaaaatgaaaaaaaaacaaaatcttaccctcaaaaatgtctttaaaaactgaatacaaaataatgacatttcaaacaaaactgagagaacttattgctagtgtgtactatagactagttaatggaagttattcaaacagaagaactatcatatctgatagaaacttggatctacaaaaagaaattaagagctccaaaaatagcaaaaataaaggtaaacataaaaagctttttcttatgttgattcactgtataaaataattgactgttggaagaagaggtcctcaaactttttctgtaagtgagcagattgtaaatattttagtcttcacaggccacatagtccctatcacaattattctactcaacaattgtaattcaatggcagccatagactatgtgtaaacaagtgggtatggctatgttccaataaaactttatttacaaaaacagacaacaggccagatttggcccacaggctataggttgccaacccattttgtctaaaataaagatagtaacaatgtattgtggggtttataacatataaaagtaagatgtgtgtcagcagtagcacaaaggatgagagggaagaattggaagttgacacatgtgtgttgggagataattttccacagatttcatcttgtgagcaaaggcactgactgtcctttgctctagattatcttttcaaagatatttgtatctccttctggagtaaaagataggcatggttactgaccactctaagagattcgggttccctaagctcagggttctgtcctttaacataatttactgcatgtgcaggtgttgtctgacccttgtcacataaccctaagcaaactggggcttggggagccagtgtggtaatgcagatgctctgatcactgctattgctgtgactaacaaacttccctccgtctctgacccagaaatatctcttcttccaggatccatgaactatagactggataacttgttaactcacaagtagggtaccatatcacttttcacagttcttcacagtgtcaagtagtataatattatttgaagatagactgtgataattaaaggtgtatagtataaactctagggcaaccactaaagaaaacattaaaatagaaatataagtagtaagtaaaagatgaagataaaatagaaatcataaaattatacccagtccaaaggcaggcaggaaaagcagaataaataatagtggaacaacaacaacaaaatagtggaacaacaacaacaaaaatccatccatgtatttaaatcctacatgccaataattaaatcaaatgcaaataatcctgatgcctcaattaaaagacagaaattttcagattggataaaaagcaagacctaactatgtgctgtctataagaaacccaccttaaacataaagaaatagattggttaaaagcaaaaggataaaataacttttactacgtaagcattaataaaaaaaaaaaggggtaggatgactatattaatagcagacaaagtagacttcaacacagggagcattaccagggataaagagggactccatgtaatgataaagaagtcaattcaccaaggagacgtaacaaccataaatgtgtatacaacagagcttcgaaatgcatgaaataaaaactgatagaatggcaagaagacacaaacaaacccataattggagaagtcaacacttctttctcagtaattgatacagcaaataaacagaaaatttgtgatgatacagaagacccaaacaatactaaccaccaacttgatgagttcacatttatagaacataccacccaacaacatcagtgcacgtgaaccattctctaagagagaccatgtatggggccgtaaaacaaacctcagcaaatttaaatgagatgagatcacctagagtatattctttgaccacagtgaaattaaactattgaatagaaatcagtaagaagagccaagatggccgaataggaacagctccagtctacagctcccagtgtgagcgatgcagaagacgggtgatttctgcatttccaactgagataccgggttcatctcattggggagtgccggaaagtgggtgtaggacagtaggtgcagcgcactgcgcgtgagccgaagcagggcgaggcattgcctcacccgggaagcacaaggggtcagtgaattccctttcctagtcaaagaaaggggtgacagacggcacctggaaaatcgggtcactcccaccctaatactgtgcttttccaacggtcttagcaaatggcacaccaggagattatatcccgtgcctggctcggagggtcctacacccatggagcctcgctcattgctagcacagtagtctgagatcaaactgcaaggtggcagtgaggctgggggaggggcatccgccattgccaaggcttgagtaggtaaacaaagtggccaggaagctcgaactgggtggagcccaccacagctcaaggaggcctgcctgcctctgtagactccacgtcttggggcagggcattgccaaacaaaaggcagcagaatcctctgcagacttaaatgtccctgtctgacagctttgaagagagtagtggttctcccagcatgcagctggagatctgagaatggacagactgccttctcaagtgggtccctgacccctgagtagcctaactgggaggcaccccccagtaggggcagactgacacttcacacggccgggtactcgtctcagacaaaacttctagaggaacaatcaggcagcaacatttgctgctcaccaatatccgctgttctgtagcctccgctgctgatacccaggcaaacagcgtctggagtggacctccagcaaactccaacagacctgcagctgagggtcctgactgttagaaggaaaactaacaaacagaaaggacatccacaccaaaaccccatctgtacatgaccatcatcaaagaccaaaggtagataaaatcacaaagatggggaaaaaacagagcagaaaacctggaaactctaaaaatcagagtgcctctcctcctccaaaggaacgcagctcctcaccagcaacggaacaaagctggacggagaatgactttgaagagttgagagaagaaggcttcagatgatcaaattactcctagctaaaggaggaagtttgaacccatggcaaagaagttaaaaatcgtgaaaaaaaattagacgaatggctaactagaataaccaatgcacagaagtccttaaaggacctaatggagctgaaaaccaaggaacgagaactacgtgacgaatgcacaagcctcagtagccacttcgatcaactggaagaaagagtatcagtgatggaagatcaaatgaatgaaatgaagcgagaagagaagtttagagaaaaaagaataaaaagaaatgaacaaagcctccaagaaatatgggactatgtgaaaagaccgaatctacgtctgattggtgtacctgaaagtgacggggagaatggaaccaagttggaaaacattctgcaggatattatccaggagaacttccccaatctagcaaggcaggccaacattcaaattcaggaaatacagagaacgccacaaagatactcctcgagaagagcaactccaagacacgtaattgtcagattcactaaagttgcaatgaaggaaaaaatgttaagggcagccagagacaaaggtcgggttacccacaaagggaagcccatcagactaacagctgatctctcggcagaaactctccaagccagaagagagtgggggccaatattcaacattcttaaagaaaagaattttcaacccagaatttcatatccagccaaactaagcttcgtaagtgaaggagaaataaaatcctttacagacaagcaaatgctgagagattttctcaccaccaggcctgccctaaaagagctcctgaaggaagcactaaacatagaaaggaacaaccggtaccagccactgcaaaaacttgccaaattgtaaagaccattgaggctgggaagaaactgcatcgactaacaagcaaaataaccaactaacatcataatgacaggatcaaattcacacataacaatattaaccttaaatgtaaatgggctaaatgctccaattaaaagacacagactggcaaattggataaagagtcaagacccatcagtgtgctgtgttcaggaaacccatctcacgtgcagagacacaaataggctcagaataaagggatggaggaagatctaccaagcaaatggaaaacaaaaggcaggggttgcaatcctagtctctgataaaacagactttaaaccaacaaaggtcaaaagagagaaagaaggccattacataatggtaaagggttcaattcaacaagaagagctaactatcctaaatatatatgcacccaatacaggagcacccagattcataaagcaagtccttagagacctacaaagagacttagactcccacacaataataatgggagactctaacaccccactgtcaacattagacagatcaacaagacagaaagttaacaaggatatccaggaattgagctcagctcttaaccaagcagacctaattgacatctacagaactctccaccccaaatcagcagaatatacattcttctcagcaccacaccacacttattccaaaattgaccacttacttggaagtaaagctctcctcagcaaatgtaaaagaacagaaattataacaaactgtctctcagaccacagtgcagtcaaactagaactcaggattaagaaactcactcaaaaccgctcaactacatggaaactgaacaacctgctcctgaataactactggatacataacgaaatgaaggcagaaataaagatattctttgaaaccaaagagaacaaagacacaacataccagaatctctgggacacattcaaagcagtgtgtagagggaaatttatggcactaaatgcccacaagagaaagcaggacagatctaaaattgacaccctaacatcacaattaaaagaactagagaagcaagagcaaacacattcaaaagctagcagaaggcaagaaataactaagagcagagcagaactgaaggagatagagacacaaaaaacccttcaaaaaatcaatgaatccaggagctggttttttgaaaagatcaacaaaattgatagactgctagcaagactaataaagaagaaaagagacaagaatcaaatagacacaataaaaaatgataagggagatattaccaccgatcccacagaaatacaaactgccatcagagaatgctataagcacctctacgcaaataaactagaaaatctagaagaaatggataaattcctggacacacaccctcccaagactaaaccaggaagaagttgaatctctgaatagaccaataacaggctctgaaattgaggcaataattaatagcttaccaaccaaaaaaagtccaggaccagatggattcacagctgaattctaccagaggtacaaagaggagctggtactattccttctgaaactattccaatcaatagaaaaagagggaatcctccctaactcattttatgaggccagcatcatcctgataccaaagcctggcggagacacaacaaaaaaagagaattttagaccaatatccctgatgaacattggtgcaaaaatcctaataaaatactggcaaaccaaatccagcagcacatcaaaaagcttatccaccatgatcaagtgggcttcatccctaggatgcaaggctggttcaacataccaaatcaataaacataatccagcatataaacagaaccaatgacaaaaaccatatgattatctcaatagatgcataaaaggcctttgacaaaattcaacaacacttcatgctaaaaactcaataaattcagtattgatgggacgtatctcaaaataataagagctatctatgaaagacccacagccagtatcatactgaatgggcaaaaactggaagcattccctttgaaaactggcacacgacagggatgccttctctcaccactcctattcaacatagtattggaagttcaggccagggcaatcaggcaggggaaggaaataaaggatattcaattaggaaaagaggaagtcaaattgtccctttttgcagatgacatgattgtatatctagaaaaccccgtcatctcagcccaaaatctcctcaagctgataggcaacttcagcaaagtctcaggttacaaaatcaatgtgcaaaaatcacaagcattcttatacaccaataacagacaaacagagagccaaatcatgagtgaactcccattcacaattgcttcaaagagaataaaatacctaggaatccaacttacaagggatgtgaaggatctcttcaaggagaactacaaaccactgcttaatgaaataaaagaggatacaaacaaatggaagaacattccatgctcatgggtaggaagaatcaatattgtgataatggccatactgcccaaggtaatttagagattcaatgccatccccatcaagctaccaatgaccttcttcacagaattggaaaaaactactttaaagttcatatggaaccaaaaaagagcccgcatcgccaagtcaatcctaagccaaaagaacaaagctggaggcatcacgctacctgacttcaaactatactacaaggctacagtaaccaaaacagcatggtactggtaccaaaacagagacatagaccaatggaacagaacagagccctcagaaataacgccgcatatctacaaccatctgatctttgacaaacctgacaaaaacaagaaatggggaaaggattccctatttaataaatggtgctgggaaactggctagccatatgtagaaagctgaaactggatcccttccttacaccttatacaaaaattaattcaagatggattaaagacttacatgttagacctaaaaccataaaaaccctagaagaaaacctaggcaataccattcaggacatagacataggcaaggacttcatgtctaaaacaccaaaagcaatggcaacaaaagctaaaattgacaaatgggatgtaattaaactaaagagcttctgcacagcaaaagaaactaccatcagagtgaacaggcaacctacagaatgggagaaaatttttgccatctacccatctgacaaggggctaatatccagaatctacaatgaactcaaacaagtttacaagaaaaaaacaaccccaccaaaaagtgagtgaaggatatgaacagacacttctcaaaagaagacatttatgcagccaaaagacacatgaaaaaatgctcatcatcactggccatcagagaaatgcaaatcaaaaccacaatgagataccatctcacaccagttagaatggcaatcattaaaaagtcaggaaacaacaggtgctggggagggtgtggagaaataggaacactcttacactgttggtgggactgtaaactagttcaaccattgtggaagtcagtgtggcgattcctcaaggatctagaactagaaataccatttgacccagcaatcccattactggatatatacccaaaggattataaatgatgctgctataaagacacatgcacacgtgtgtttattgcagcactattcacaatagcaaagacttggaaccaagccaaatgtccatcaatgatagactggattaagaaaatgtggcacatatacaccatggaatactatgcagccataaaaaaggatgagttcatgtcctttgtagggacatggatgaagctggaaaccatcattttcagcaaactatcgcaaggacaataaaaccaaacaccacaagttctcactcaggtgggaattgaacaatgagaacacatggacacaggaaggggaacgtcacacactggggcctgttgtggggttgggggagaggggacggatagcatttggagatatacctaatgttaaatgacgagttagtgggtgcagcacacaaacatggcacatgtatacatatgtaactaacctgcacattgtgcacgtgtaccctaaaactgaaagtattaaaaaaaagaaataagatatctggaaaatctccaaatacttggaaattgaacaatacacccatgtgtcaaaaagaagtttacaagggaaatagaacaaatttaaggtgaacataaatgaaactgtaacatgtcaaaatttgtgggacccagcaaaagcccagagagaaatttacagccttaaataagttaatgtctgcacagcgcaaagtgctttgcgcatggtaagtgctcacagagcgttagctcttactgttattaggtgtgtatcagtaccctcatttacaaaatgacaaagttgccacattatcattattggttcctatgcagtagatgctgcaactttgtcactttgaagatattataagaagaggtgggatttaaacccaagcagtccgacaccaggtaagttctctaaaccactgcatcatgctacatctagatgttgagtgttttacaagtcacattgctagtatcagaggcaagactcaaatgtaagccttctttgagtagttcattatccactttaccatgatgtctattctaattatacaggtttgatctgtcttatctcacaaattacactgtgtctttcttcaagagagaaaatggtatcatctatttatttccctggtaaatcctcgggagagctcctctgctgaatggattgtcaatatatgtattgattaaaatacagtaacttgaggggaaactcaagtcaatgaggaaatatatatgtattttacatgtttatcgttgtcttaaaaaataaaaataaaataaaataaaacttagctgtctacttctacctcttaggagagtggccatttttagcaagcaagcattttgcctgaggagcacatactagctcctttttattctcctctactccagaaaagcttctcatttctattaatctgtgatctattaataataatcattcacttgtttcatgacaggtggttaaatgtgatttgacattactcaaagtaaacaactgattaatcagtatatgacagtgggcaatcactgttcaaagctaatagcataatggaaggtaatatgctgtacttggatttcatgagttacagccaaatattgtaggtagaggagggttgtaaaacatgcgctttggaaaagtaccttcctttgaaaggttgtctttgaattacactgacaaagcattcatccccactttcactaaaggttttacttgaatgttttctgttattggctgtgtctcatgcagagattttcagaggaataaaagttcatctattttaatagttttaatggttgctatacaaatggataaaagccacacatctgttgtagtcatcatcactaaaagtactattatatgcaaaattataacctgggagtaggaaatagaagctcttatctttgaatgaattgtttcacgttctttgctggtgttgcagtcagacaacatctgaaaggtttggctgaacaacttacacctttcacttagatatctcctatttgaaaaactaagctaatgctccattttgctacataggaattgccggagacatgataaagtaggaagaaatacctgagctggagtcctactcctcccacttgcctgggccaccccagtctagtttgtctctgatcctttttacaattctgtaggacagagatttttatcagcctcatgggattgtcatgagaattaaacaaatagtatatgtacagcacacagtccatgataaacattcaggatagatttgtttccttcggttttgacacataaattatacttcccttctgcaagtggttgttttatcattttctaaaatcatgtgagtttgaatgcaaaaacatgagaatgtcagctttaaaacatacaaatgagaaccagtttgaaaaaggaatttagttggaaacccagcttcatgcctcctctgcagctctcccagtggaaatggaaattccttgtggcttagaggaaagccagtataggccgcagagtcaacaaagcaaaactgtcattgcattactttgttcttggtggtgtgacacataagtacactcccttttgttggtttgtcgtgtctttgagtagtaagtgaatactgtgagttccctttaactctgattatgtgccttttgttatctcgattagtgattatcaaagcggatggctccacatgccccagagattgcactaacagttcatccgtagaagcatggaaagaaaatattagagctgttatttattcatctaaaaataaggagatttagttttactaatagtattggcctttacaaccttccagggtctgtgtcagcctcagtactccagatatcccgagggaggagataggagttcctcaacttgtagggcttggcatacatgcgctcacctgttcattcacgtaaagcttagtgtagtatatgtgttcctggttacagtatctagatttagttaaaccctcacgaaatagcgtgtttccccacacactgaaggtgatagaaaaatataagcacatatgacaaaagataatggcagagctggcatccccctcctcctggaacaagtgccacattacaagggaaaaacagtgatgaaccagtctaatctcacagaaaatggatccataaaagttatcaggaagacttttaggcactatggatttaatattcactgtaataaacgatgcatcttaccgtgggtgaatactgtgcttgctgatggtcatgtgaaattgctgtgattagtaatctgtaattacccagattattttcaatgacattttaatgagtacaaaaaacatgttttgtatcattggtttttttaatctaattgattttatctttatctcattcttttaaatttattttatgaacattttataatatgtaaaacatcagtgctgtagtatattgcatgatttataaagaactagaacatatattgcaagcacatcctcatttttttacttgtagatgtgtacaacttgaaaagtttggaaacctctggtctggattctgactgatcatcaaaatcacctggagagcctgatgtataatagaaggtccctgactaggccctgggatcagaatttcacaaggcttctcagctacttctgatgatcagccatgcttgagaactactccttgtctgtatgatctactgctataaacaaaacaaaaatccagtagtgaaatatcagctttcagcatgttagaaagaaaaaaaaaattcagtaagcctaaagcatatgtaacatctatctactttttaattaccatttttttattttttagaatgtgtttttaacagatatgctcctactttttaaatattttttggtcaaagaagataatatgcataggtgttagattgacccatatgaaatttctaacattaaaccatttttttaccaacaaaattggcatttcatatggttaaccaattcttttctcagaaaaactatgctcagtttacaacctgtgaagatatttacacaaaaggaaagcatttattttgtgtattcattgttgcatattttaaaaataggattttaatctattacaatatgttttgctatctgtgttgtgtcttttttcagatatttattcactatattataaaaatcaatttttggacctgctgtgtctaaactctgtgaacaaaatattaatcccagaaactcaaaaagaacttaaaatccgacatggggaagaacaaggcccacaggcacgtagcgaaaagcccacttgtggacaaaataagcagcttgcaaagtagctggtggtgccagcaaactgcttgagaaagaaatggtttatctggaatcacaagcagtgtcaccagccatgagctgcctttgttctcactcattgccacagaattgtgaggcacatgcttgttaatggctgtggcgccagctaagtctctttaccttccagaacaaatgcatttagtggcatttatgtaatatagtgtactttccactagaatggataagacaaaagttattgtactcttaaacaattagcatttaggagagtaattctgaaagaaaatgcataaaaacgtttgtgaaggattgtttgtaacttaatatattttacctataaaatagaagacataaaaggtaatgctcaactttacaaaaacacaataattttttatatttttgcatgtctgactataaacacctaaatgttattctcttgaatttaaaagggatctgcagtcttcttgatttatgaacattgtggttttaaaaataatttgctgaaaaatgatgttttgttttcattttttagtgacaaatatttagggaccgtgtatttccagaatgctactgtgttaatatcttgctgcatactttgggctgtgctataacatgaagcaaaagtaattataggttgctatttgttatccctggtgatcatgataagggaaatgtggctaaattcatagataatccccaaaacatcattttagccattagtttcaaattctttcctgttaagcccttttgagagagagagagagagagagagagagagagagagagctaatattaagcttcaaaagtgataggctttagggtttagctttctctcccgactttctgttggatactgctctataaacgaaatataaatgcaaggtcaggcagcacaagaaagagtagaattcaggaggctacttaattcacagaatgaataatcagccctggatattgaggggttgcctctgattcggctatcaaacccaacggagagcaaactgcgtttaggagggctagtgaattaaaagccgggtcactgtaggaatggaatcatgatagtttgactaccatgtgagaaaggcggctactaaaaatacatttcatacctcttcttgtttaaaaaataacactttacattacaggtgatctccttctttagctcaaggttgctgcaagctggagctgagctgtcagtggaacgggtcctggaaatcattaagcaaggcgtcgttgcgctgcccaaagacagactgaaggtaagaaggctaaagaaatgtccacttgacactgccgtgtcccttgatgtaaatgttagtgtcttagcagaccctatccagaatcatgctgcttatccagtacatagactagaagggctcctcagaactgtgacaaaggtttctgacagcttttcaaaagaagcattaatactttcatgccactgcatatcctacaagtagccatggcatgcactataattcatatactgttaataaaaggacaccttatttttttaacccagtgaaacaaattcggccttaagagtatcatcaagagttaatgggaaggtgatgatgaagatgatcacaagagtagctaatatttccatagtgtgactcagtgccacacaggttctaaatgtgttatatcaagctcattcagtccctaccacagccctttgcggtgggtagtggtatcatcctaatttttcagatgaggaaactgatgtacagtgaggttaagaaacttagccaaagccatacaactggaaaatgatggagcctgcagattgaaacccaggaagtctatctccagtgcccacattcataattgctgcactgtttactgtgtgcctgggatgtaatagtggaaagagatgcacttcgtggagaaggtgggggaagtgctgtatttgaagaaggcatttacatctgtttgatagatgtattcctgaagcagtctcacaatataaaactcatacttcaagactaattatcccataagaaaaagatgtaaagaagatcctttggggaatgcatgaatgtacagcattgcagcttacttttactttactgttctttttagttttttcttcattagctctaattttttagagtgctttcacctaaattaccaacacaggaggtcatagtggatatttggccttcatagtgttttgtcacagttcacgtctgttccagtgttgttactgtttttgggggctatgtttttcagcactatcactagaaccactgcttaatgaatgcttgagagatattgttgtaggatataaaaatattttcaattataataacagagtttgtaaaataacagcacattagtcatcataatcatttactgaagttccactgtacataaacaacagggagattcacacggtactgtgcaaagatggcaaatgttctgtttatcagccaaagtggcaccaccatgtggtaatagcataaaaacaggttagagttcactgggccctccagcttggatgtgttcctattccagataatttttttaaatatagagaattcatattgtttccatttttacataaagtaagaccttggtttgttggttggtttgggggtatttttgtgggatttttttgaactatttcaaatttatgtaaactataccatgtgaaccagtacaaaaaaatctatgaagattaaagtggctactcccaggaagtgatggatcttggtgtgtaagctcagtcaagaacaaagtagaaatatcgaggctgccaaaaaaggacactgcaatggagtctggggaaggttaatcttgtagttcactgtaatacttaccttaaagcaaaatgaattacagtgtgcaggctaagtgctggaatgttaatatttgttcatttattatactatattcaaaaataaaatgtcatttatatttgagacagtgacatataaacaaaaatgtaactcttttcgtttttcagaattatggctaaatagagaaaataattgatctatggtgggtcccaggcaagttgactctgatttagagcaagatcctattgaggccaaggtcatgggtaaatttcttaagagggccagttaatttggttctggaacatagcaagaagttgtactcctgacctcagcttgccaactcacttcatggttgcaaaaggatagaagatggatgattcagtttaaaaacaaaacaaaaaaaaaaaaacactatcaccagtactagaaaagattacatttactaaaattacatttacccacagatggtgagtcatcctagttggtttaaatgatagcatattattaccacagatgttactagaaataaaaggctgtttatccttacaatcaagccttatctcaattattttaatcatctttttggattgagtgtttataataaaatgagtcacttaaaatctctagagtttaattcacagaataccacggtatctaaagttgattcaaaattcaagctgtgttgagtaatgtttacatgatactacatgacagcacattatagtctttggagtagtttactaatatatactgataaaataattgtcgggtgtgtaataatagtttcatacatgatattgatgtaaaagagttggtttcaaattggaaatgctgtcttaataagccctctatgaaaatgtggaataatatatactaattgatttgttgtttcttaaaatatataaattaaacacttagaaactcagaattctttactactaccttctgggttgttaagaggatcacagcgccccttactcatgaaaaattcaccagctaatgtcagctgaagccgatgagccaaaagttttagaactttcccttgcattgtagaattgaagccaactttgtagaagtagtattcttccaattttgggcaagtaaacagtaagatctggaagcccatggaagagtaattgacttccaaccaaataaaatatttttcaatcaaatattatttgacatagccttctaaaatatttgtgtaatatcctatgtgggaatgcatactatttggataaatctgtctatatagttaaacaacttggctgttcagagtaaatagtattaatatcattctaaacattctcttcttactggtattctgtgaagtctgggaaaggcaataccaggtaattattttttccggagcctcctgcttaaacagagacctaaagaacaggctctgaaatcctgagtcacttatttctcctttaggatttggaaggaaataaataaagttagtatgtcctctgggagccgacttagaagccgcagctcaaagctctcactgtctgtatccacaacagggcatgttcctggctcgcattttgcttactgtggagcaatttgaatgtcatggtgatgggtcagaattcttccagatccgtgcgtgttctcataccactaccacctcagattttattatgttgggctctcaagtcccctcttttcttcagtttagtgaattatctatgtcatttgaggattaagaattttactgtatttagtgtttgaaaactaggtagtgcttttcaaggggaattaaccagaagataacttatcttttagtgtaaataagaaagtgtggaataatatgttattgacattaaccaaacttcatttactcaagacacttgataagtcataggaattaaaagtaattaccagtttcacactaaatgatttttaaagcctttattttatatccactttttagaatactttcatggttgtttttagttgcataaagaaaaatataaaaaatcatatcaactaacttgcttaaaacctttccctttgctcctattcaggggtctcttccctatctcaccctaagcatctttcgtttctttgtcagttctctatccccagagcagattcctgagtgctgtactgggagggccccttggggtcccacaggaacaacccccatgtgtccacagtcactctcttctgcctccccacacatccacactcctcgtgtatctctacctgtggaaatatgaatagccagcatcctccctctaactcaaaagtactgttagatcccaaaccctagaaattctcatttctcaagtcattcctttccctccacgttgccgccctcccatgtggctgctccacatttctcccacagtctattgctataaactcctaattggggtctccacttccacatccttcttcctccccaggtgttcttagccctgttgccacccttacaccctgctctgatccagcacacaaggcacttcatggcctaactcctgacttaagttgtgttctttttcctcctacggatcctgtgctccaacgctgtcagccgctggccgatcgtcaggtggacagagtccttgcatgccaggcctttgtgtatgcagcttctgggttctcacagtttcatggcttgtctgtcaggtgagccgatcatgctccccgctttctatgaagcccactctgattcacccacgcacactcggtggttttctccacattcctatggcacacgtatgtccctccattatagcaaaaccatcccccagcacacccatctcattcaatacatattcgtggggtaaattaacttcaccctgcctctggattcctatttctctccttcttctcagccaaaatcttgatttctcctttggtccttcaactctccttattcactgcacagcattagtgcagaacattaaaggagggactcccagtgaggagtgaggcttttctccatggcttgctgtcccaaggacctctcagcccaggctctctggtggaagactaagggtctcttaccgctaagctttccctgctagttggttttcctgtatttggcccttctccttctaccacccttctccttctgtccccagatttgcttctcaggatgtatgcacccacctgtccctttacattaatttgcatcatcatcatcatcaccgatatcacctataatatacaagcaaagcatctcttacaaatgtggtttgtttcttcctactgcagctcgttattttacccccactttgaccacaacattgctaggacgttggggaaacagaagtgtgtaagacaccacctctgccctcagaaaaatgtatcatctttcaggagagaaaggcacccccttgcgttgcagagctgagtagagcagggcactttacgctgcgtgtaaaatgaatggtgtagaagttaagttctggaagaaggagtggagacactgctgggaagaactagtcagggaacactgaagagaaacctggacttgaccttctctgtcttaaagggatggtaaggtttccataaagctgggatgaaagagaaatccagatggggaaatctgtgtgtgagtacaagagaaggcccaaggcaagttcagcttagtgtccaactggaacaataggactcccctatttctctctgctgtattaatgtggcttgtattatttaatggtacagtaaagtaattagtggctttcaaactctttagactgccacccacagcaaaaaatacattttacatcatgatacaattcacacatttatatacaactgaaatgaaagtttgataaaacagtacttaccatcattaaatgtgatgggctccgatattgcctattctgttttctttttttaaaattgctagtcagacccattaaattgatttaatgatccagtattatttagtaactcagagagttttaaaaataatgtgtcaaggctgggcgcagtggctcacacctgtaatcccagcactttgggagctggaggcgggcagatcacgaggacaggagtttgagaccagcctgaccaatgtgatgaaaccgagatcatgccactgcactccagcctaggggacagagcgagactccatctcaaaataaataaataaataaataaatattaaatcactgtttttcaaagtgtgatcctcatagcatcatcagcatcccctaggaacttgctagaaatggaggttctcaggccctaccccagacccatggaattagaatctatggggctggggcagtcagcgctttaacatcagccgctgtgtgaactgatgcctgctccagtttgagaagcacagtactaggtaattgctccaaacacaccagccctctccactcgtagagccttgcctggctcactctccctgctccagatatctgctggcctcattcctgcatgtccttcaagtctttactctcatgagcaaatgaaatctctctctccatcatgcctgcccgaccttccaggtaacatttctgcactcccagccccccaatcctactgtatgttttcttgttccgcagcattgtcatctagcatactgtataattatttattattatcctcctagataatgtaagctccaggaggccaggggtcttcatattttgtttactggggtatctgaagtgtacctggtacatactgggcactttaatatttgctgaatgggagggagggaggaaatgagaaagagagggataccaacgaacaatgggcctgttgaccataaagtgctgcttcaagaaaacattctttgaagaacagctctccatagactcttaaaaggtcagcttttattccaaaatattataaagaagctcagttaagactggaggtcttggtcactttgttggaatagttgctttttaaaagtctacattattccacatttatgcattcttatagctacaaaaccctactgtgaagacctccactttagtagttctcatcaataagctaattcctatgtaaattggcctaactaaattttcaatagtttctcagtggttctcttcttgactgtcacctgcagtgatttcatagttcaagcagagtaaaatattctgatttatggtattaggataaatttttccagtgatctcattttttcctatttctgaacctttctcagagggtgaagagcatggagggcctgtcaggctctatgagagtccaataaagagccactgtttgctttttctggttcattctctctactttccctgatccatgtagagcatgtgtatgttcagggcctgacagaaagtcgaggagaccgagtgcctgacaccgtccaccagcccaacagcaaaacctcttcttcagactaaatctgcttctagcttatagctactttaattgtacaaatgacgtcatttgacttttttctcctgtttttatttttatcactttagacttttaaaaaattgttttctctctttcctgaaatattgttacctttttgctgggggatgagagctaggaagcattcagcataaaggagatagctctgtgctgggcttctatcctcaaaggagagatgacatttctgccatttcaccgggcccaaaatgttctctgcagaattcaacaatcacagtggctctccctcccattctgactctccttgagtttcttgtccaataaagacaaagatcaagtcttataagttacttctgcctcccatggaatagtaaacacaggcttataaatggatccggaaactgctagaataatgtaatacctgattcttagaaccatttagtcctcatatgagaaattttatgttatgaactccatggtctgacatgcacacgtgcacacacacacacatttgcaggatgttggtacagctttccaagtcaccagttctacatattgagaaggaagcaaatgggaaatcttagccaaggccagtccctcagttgaatccctccagagtcattttgcaggacaaggactgtagaaaggcataatagaacacccataatgttgatactagaatctcttctgtattggggttatctaagaaggaatctggtcacattgattctccctccatcaaaatgaggatttcaagagaattctcttaattaatgaacagtcacctggagcactcttttcatatgcaggttccggatcccacctgagattctaacctagtagactggtgatgaactcaggaatctgtctggttaaacagttctttgagcagtgctgataacctgccagatttgggaaccactactgtatggaccagttttcttcaattccctgccctcacaaaaactaaggagatgatggctaggattaacagttggccttgataaggttggagctgttttctccaacttccctacaaaagacagagaactttcactttgtgatccttaaagtagattcctttaaagtagaaaatattttacatgtaacccaaatataagatgagaattactttaaaatgagacagagtagtaaaattccattaataaagtctgtggccttttaaatgttgcatatgcttttcagtctgacataagtatccctcttttgactcaacttcctttttctttgttgtttactattcagttaacattaattgagcacttgctctataccaggtgctctggtaggtatttttatataggtgatctcatttagtctccctagcaattctatgaggtgtaagcataatttccattctgcaagtgaggaaactgaggctaaggagttctttggagccaggtgcagtgactcatacctgtaatcccagcagtttgagaggctgaggcaggaggatcacttgatctcaggagtttgagaccagcctggaaaacataacaagacctcatctctactaaaacgcccccctaaaatattagccaggtgtggtggtgcacacctgtagtcccaactattcagggggctaaggcaggaggatcgcttgtgccctggaaattgaggctgcagtgagccctgatcctaccactgtactccaccctgggtgacagacaagattattttagtccctcttatctttgagccatgaatttcagctattccttctttcagatcctaaatttttgcttcctcttaacccatttgcttattagaccaatttgtgtaactgaaagcatacataatacaccaaattaagtccttgagtttgacaatatttgtactcagtgttgtagagtaacctttgaaatgtttgaaagttatgtccattgctgctttatggagtactgtttaaaaaaggctgttaggcctttttttttttttttttaagttctagggtacatgtgcacaatgtgcaggtttgttacatatgtatacatgcaccatgttggtgtgctgcacccattaacttgtcatttacattaggcatatctcctaatgctatcccttccccctccccctaccccacaacaggccctggtgtgtgatgtgaaatggggaaaggattccctatttaataaatggtgctgggaaaactggctagccttatgtagaaaactgaaactggatcccttccttacaccttatacaaaaattaattcaagatggattaaagacttaggtgttagacctaaaaccataaaaaccctagaagaaaacctaggcaataccattcaggacataggcatgggcaaggacttcacatctaaacaccaaaagcaatggcaacaaaagccaaaattgacaaatgggatctaattaaactaaagagcttctgcacagcaaaagaaactaccatcagagtgaacaggcaacctacagaatgggagaaaatttttgcaatctactcatctgacaaagggctaatatacagaatctacaaagaactcaaacaaatttacaagaaaaaaacaaccccatcaaaaagcaggcacaggatatgaacagatatttctcaaaagaagacatttatgcagccaaaagacacatgaaaaaatgctcatcatcactggccatcagagaaatgcaaatcaaaaccacaatgagataccatctcacaccagttagaatggcaatcattaaaaagtcaggaaacaacaggtgctggagaggatgtggagaaataggaacacttttacactgttggtgggactgtaaactagttcaaccattgtggaagtcagtgtggcgattcctcaaggatctagaactagaaataccatttgacccagcaatcccattactgggtatatacccaaagcattataaatcatgctgctataaaggcctttcttgtacataatattgaaattgcagtaaacatacaatggcttaatgtcatatttacttttggctaatcattcttgataaacaggctagcccatgatattcattataatgtcttacattatttttgtttaattaaatatgtggtagatgtgtaagcaatttttaagcagttttattctttgcaatggataagcaaattaagcatagtttttactttgtaatcctagagtagaaaaatttagtctttattattattgcatcttgaatgtagtcataaactaaaacacttaattgaaaagtgataaatatctaatttttttggtagcaaaataaatcttgcccagtattttagtttgttcaggctgctataacaaaatactttaaactgggtagtgtgtaaataacagaaatttgtttctcagagttctggagactgggaagtctaagatcaacatgtcagcagatttagtgtctggtaagggactgcttcctggtttatagatggccatcttcctgctttatcttccacatggcagaaggggtaagggagctttctggagtctcttttatttttatgtattttttttttatttttattttttgacatgagcttcactctgttacccgggctagagtgcggtggcatgatctcagctcactgcaacctccacctcctgggttcaagcaattctcctacctcagtctcccgagtcgctgggattacagctacgcaccaccatgcctggctaatttttgtatttttagtagtgatggggttttcctatgttggccaggctgatctcgaactcctgacctcaggtgatccacccaccttagcctcccaaagtgctgggattacagagccaccgcgcccagccctgcagtctctcttttgagggcactaatccccttcatgaggctccaccttcatgccctaattatttccccaaagcctcacctccaaatactatcacactggagattaggattccacatattaactttaggggaacacattcaatctatggcacctagttctccagaccatggtgctgtggtttgaatgtcccctccaaacgtatgttgagacttaattccccagtgcagccgtattgagaggtggggcctttaaagtgtgattggatcatgagggctctgctcttgtgactagattaatccattcatggagtaacggctaatggattaatgggtatcatgggagggggacttgtggctttataagaggagaaagagaggcctgagctagcacatttagccccctccccatgtgatgccctgcactgccttgggactctgcagagggtctccaccagcaagaacaccctcaccagatgcagcccaacctgggacttctaagcctccatatctggaagaaattcctttcttaaaataattacccagtttcaggtattctcttataagcagcagaaaatggactaggacacatgatttccaatgactgcaggacccaagttcacaatgcaagggcagttctggaaaaggctggcattcttcagtaggaaaggaaacattaagctgtgtgattttaccttgaaatccccgctattagttttgatagaattttctttggtcagaaatgtgtcattcacaaactaaaatttcctaaaaagataactgtggtgcttaaaaaaatagaaccagttgccaggagcagtggctcatgcctgtaatcccagcactttgggaggccaaggcgggtggatcaccagtcagacgttcaagagcagcctggccaagatggtgaaaccccgtctctactaaaaatacaaaaattagccaggcgcggtggcaggtgcctataatcccagctacttgggaggccgaggcaggagaatcacttgaacccgggcagcagaggttgcagtgagctgagatcacaccactgcactccagcctgggtgacagagtgagactccatcaaaaaaaaaaaaaaaaaaaaaggaccagttgtccttattcatctgcctcaattttgactcttctgttagatttgtccaaatgttggaccagtatttcagggaacttcctaatctctgactaatataatgtcagttactggattgtgaaaatcactcccagcatgttctacttgccccacttgaagaatatccactatttttaaaaaccctaacattaaaaatggtaagttggagacgatttgtgtctagaaatgatctttgcacatcaaagcatgttctttcaaatagaaattaccctattagatttaaaatatgaaatagttcacttaaagtcaccttttctttagcattagataagttaaacttgagatgggtttggtattaaattatattgttgctcactagtctcacagtgagattggagggaacatattttatacccaatttcggaagtttattgagtcataagagtaatccctgtttttggtcatacattgtatctagaacatagtcaaggtctcatctactaataaagctacaccccttcttctttttcagtgtaaattgagagatcatatatacaaataaactatagatgtatactgtaaaataatagttagaaagtgagtatccatataatggcttttcatatcaagaaatggtcattgccaacagcccagaagtcccaatataccctctggaactaaaaactgtcctgactttgggtataactgtcatcgtcttcataattttaccatctgcgtgtatatttctaaacaatgtggtttccaattctgaccttttcataaatgaaaccatgcactatattttcctttgcaactttcttcttccagtcaacattttgttgatgagagccatttatgttgttagacaacatttgttcctgtccactgatgtattagtattacattacataaatagttcacagtttctccattctattggtggacatctagattatttcaaattttgagctactaaaaaaattccccaaaataaatgaaacaaaacttgacagaactgaaaagaagtagagacaattcaaaaataatagttggagactaatgccccagtagtagaacaactagatagaaagacagcaagaatataggtttaaacagcactatcaaccaacatgatctaactaacatctatagagcattctacccaatggcagcagaatacatattcttttcaagtacacatggaacactctccaggatagaccatgtgctgggtcacaaaacaagtctcagatttgaaaggattgaaatcaaacagatatgtttattgaccacaacataattaaattagaaataaacaaaagaaaggtatttggaaaagcttctaatatttggaaattaagcagcatacttttaataggtcataaggaaaatttaaagacagtttgaactaaatgaaaatataaatacagcatatcaaaatttgtgagatgcggctcaagtggtgcttacaggaaaatttataactttaaatcctacattagaataaaagaaaacatcagataatctaagcttctaccttaagaaactaaaaagaaaagcaaattaaacctcaaataagcaaaagggcagaaatcataaagatcagagcacaaatcaatgaagagaaaacaatagataatatcagtgaaactaaaagctgattctttgaaaagatcaataaaatggataagactttacctagaatgagcaagaaaaaaagaagagacacagattaccaaagtgaagaatgaaaaaagagcaccgttattgaccctgtagaaattaaatataaaggaatacaatattagaaacaaattgaaatgaacaaattaaacattgtagatgaaatgagcaattcttagaaatatacaaattatcaaaactgacttaaaaagaaatattaaaaactgaatagacctatcactattttttaaatgaattagtaattaaaatcttcccataaagaagaacacaggctcatatgtcttcactggtaaatagtttttgcaaagaaataatgtgaatcctacacagactctttcagaaactagagtaagaaaaaggaatgctacccagctcattcagggaggccagtatgaccttgataacaaaatcagacagagacatcacaggaaaagaacagaccagtatctctcatgaacagagacacaaaaaaatcctttacaaaatattagcaaactgacaccagcagtgtacagaaaggattgtacaccataaccaagtcagatttatcccaggaatacaaaattagtttaatatccaaaactgaaatagtataatatgccatattagtagactaaaggacaaaccacatgatcattttaatagaccaagaatcaacaaaccacaacccacaggccaaatcctgcctgccacctatgtttgtaagtacagttttcttggaacacagctacacccacttatttatgtattgtctgtgtctcctttcacacgacagtagcagagtcaagtagttgtgacaaagatcatattggctcacaaagcctaaaatgtttattactgggccctttatagaaaatgtttgctgacccccacaatacacacagacaaaacctaacatctgttcatgataaaaattctcacacaactaggaatataaggtaaattcctcacctgacaatgggcacttggaaaaaacctacggctaacgtcacacataatgatgaaagactaaattctttttccactgatcagggacaaagcaagaatgtcggctcccagcacatgtattcagcattgtgcttgaggccctagaagagcatacaacaagataaagaaatcaaatgtatacacattaaaaaatgaataagtaaaactgtctgtatttggccaatcatgccacttcctgtctttctttgaaattctacccatgtttccaaaagcattgccaaaaccctctctccaagttcttctttaccattctgtactgtttttatctcctgctaccttgtgtattaatatgtatgtgtatactttaatctcatttcatttttaagttaattgttgtgttttctatgtttatgtcaccctatagcatattgacataatacactaccttgcacagaatagctacttgttaaatatttctgaataaaataatgcagtgtggttgaaagttggcttgggaattaagtttttgcttctaggtatcaagaccctaccagataatacaccctacagaaaacaactagaaagtctgaacatataatatgaaacacaactacttgaagatactggagaatgaatagaagcaaaccatttcaggctgtttatgctcatttagaggagaggaaacaggaagctatatacatacatttctatttccatggcttttagcctgggaccaagtacagtccatgtagttcgtggcatggtggcaagcacctcacatggaagactcttgatatttctggcctgggaaatcacagaagagaaactgggaaagcatgaatgctgaagagagtagaagaatcctagaagggaaagagctggaagggaattcccaaactgcctgtctacatctctgaatcatagcagctcagctagaaaccaaaactctgaactaagaccagctctgaagataccgaagagtgagcagatgcagagactctcatgaagagggtgcattcttcacttggaggatggaaaataacaaacctacttcctgacactttcagccttgggctgactgcagtgacagcatcacactgcacacagagcagaggtggggcacatgtggaaaagtagcagagcctttctggcctgaaaaccagaaaagagaagttgagaatccataaactctgaaaatagtggaggaatcccagaagagaaagagtcagagaaaggaatccttaaactctgccagtccacatctttgactaaaccttgaaccacacatctgcagaacaaactttaaacagcctggctaaaaacaaaagatcaaaatacagagttttcagttctagcccagacaagaatctctacagctcccctctcccctctcccctctcccctctcccctctcccctctcccctctccctatcggtctccctctccctctctttccacggtctccctctgatgccgagccaaagctggactgtactgctgccatctcggctcacggcgacctccctgcctgattctcctgcctcagcctgctgagtgcctgcgattgcaggcacgcgccaccacgcctgactggttttcgtacttttttggtggagacggggtttcgctgtgttggccgggctggtctccagctcctaaccatgagtgatccgccagcctcggcctcccgaggtgccgggattgcagacggagtctggttcactcagtgctcaatggtgcccaggctggagtgcagtggcgtgatctcagctcgctacaacctccatctcccagccgcctgccttggcctcccaaagtgccgagattgcagcctctgcccggccgccaccccgtctgggaagtgaggagcgtctctgcctggccgcccatcgtctgggacgtgaggagcccctctgcctggctgcccagtctggaaagtgaggagcgtctctgcccggccgccatcccatctaggaagtgaggagcacctcttccccgcagccatcccatctgggaagtgaggagcgtctctgctcggccgcccatcctctgagatgtggggagcgcctctgcccggccgccaccccgtctgggaggtgaggagcgtctctgcccagccgccccgtctgagaagtgaggagaccctccgcccggcatccgccccgtctgagaagtgaggagcccctccgcccggagccgccccgtctgagaagtgaggagcccctctgcccggcagccaccccgtctgggaagtgaggagcgtctccgcccggcagccgccccgtccgggagggaggtggggggggtcagccccctgcccggccagccgccccgtccaggagggaggtgggggggtcagcccccgcccggccagccgccccgtccgggaggtgaggggcgcctctgcccggccgcccctactgggaagtgaggagcccctctgcccggccagccgccccgtccgggaggtgaggggcgcctctgcccagccgcccctactgggaagtgaggagcccctctgccgggccagccaccccgtccgggagggaggtggggggctcagcccctcgcccggccagccaccccgtccgggagggagttggggggggtcagccccccgcccggccagccaccccgtccgggaggtgaggggcgcctctgccccgccgcccctactgggaagtgaggagcccctctgcccggccagccgccccgtccgagagggaggttggggggtcagccccccacccggccagacgccccgtccgggagggaggtgggggggtcagccccccgcccggccagccgccccgtccgggaggtgaggggcgcctctgcccggccacccctactaggaagtgaggcacccctctgcccagccagccgccccgtccgggaggtgaggggcgcctctgcccggccgcccctactgggaagtgaggatcccctctgcccggccaccaccccgtctgggaggtgtacccaacagctcattgagaacgggccgggatgacaatggcggttttgtggaatagaaagggggggaaggtggggaaaagattgagaaatcggatggttgccgtgtttgtgtagaaagaagtagacatgggagacttttcattttgttctgtactaagataaattcttctgccttgggatcctgttgatcggtgaccttacccccaaccctgtgctctctgaaacatgtgctgtgtccactcagggttaaatggattaagggcggtgcaagatgtgctttgttaaacagatgcttgaaggcagcatgctcgttaagagtcatcaccactccctaatctcaagtacccagggacacaaacactgcggaaggccgcagggtcctctgcctaggaaaaccagagacctttgttcacttgtttatctgcccaccttccctccactattgtcctatgaccctgccaaatccccctctgcgagaaactcccaagaatgatcaataaaaaaaataaaaataaaaaaaaaaaaaaagaatctctacaatgtaacattaatattattcaggatacaacccaaaatgtcccgacatccacagaatcaagaaaatggaacacattttctgcacacagcaatcaagttttctaccccaagacgaaccagatgttagaaccaacaaagattttgaagtaactactatggctttcctcattttttttctttgcatgaaacatgtttttaatgcatgaacattccagcagagaaaggagatgtctcagccgagaaatagaaacaattaaaaagggccaaatggaaaaaagacagacagttgcagatatgagatgctgacaccaaacagaataaacacaaagaatctcatgtcaaggcattgtagcatcaaagctgttgaaagccaatgacaaaaaccaagagaaaaacaacaaagtataacatagtaccaaattcccttatgcgggaacaactcaattaaccttgcacttctcattagaagtcagagagtctcaaagagaatggaacagtgctaaaggaagttcttcaggctgagcaaaaatgatgccggatggaaactcaggctttcagagaggaaggaaaaatatttacaagaagtagtaaatatctaagtaaatatataacattcatatttatattttccattctctttgccttcttcccttcctccctttcctcccttctttctctttaatttttaaataaactaaaattcctaaatgacatggtggcaagcacctcacatgggaaactcttgatatttctgacctagaaaagcacaggagagaagctgggaaagcataaatgctgaagagagtagaagaatcccagaagggaaagagccggaagggaataaccaaaattatcacattggtttttaggatttataatctatgtagatgtatatataacaactatagtatataggagaggagaggagggatatggccctgtatggttgtgacagttgtatagtttacatgaagtagtatatatatatatatattttaatttttgtgggtgcataggtatatttatggggtacatgagatgttttgatacaggcatgcaacgtgaaataagcacatcatggagaatggggtatccatcccctcaagcatttatcctttgagttacagacaatccagttattctctaagttattttaaaatatgcaattcagtttttactgactatggtcaccctaagtaatatattattatctgtaagttgactgagaaaagttaagagtgtatattgtcatctctagggcaaccactgtaaaagtaataaaaaaatgaatagctcaaaagccaacagaaaaattagaattcttaaaaacattcaaataattttttccccaaagcaggaaaggaggaacaaaacaagagaggatttgagtagaaagcaaaatataatattggcagatgcaaacctaaccatatcaataattacatggaatgttaatggaccaaacactcattaaaaagcaagaattgtcagaatggataaaataagacccaactatatactgtctgcaaaggatatgctttaactataaaaatacaggttgaaagcaaatcagaaaaagaggtaccatgcaaacagtaagcataacatggctttactaatgtcacataatacagatttcaaaacaaaaccaaaggtgaatgaggatacttcataatgatcacagggacaattcaagaggaagacataacaggcacaaatgtgcatgtgccaatagcaaagcttcaatatcatgaaacaaaaagctgacagacaactccactgtgttggagacttaaccctccctcagcaactggtagaacgtctagaccagaaaaattcactgaagacatagaaaatctgaaaaagactatcaactacctcaccttgattgatattcccagaacatttcactggacagtggcagaaattcacattattttcgaatgtatataacacccttaccaagataaatcctattttgagccatagaacagatctcaataagtttaaaaaattagaattgtcaaagttaaattgatgaaatcaataaaagctagaaaaggcaaaactgagagagaaagcagatctgtggcttccttgggcccagggggacagcacagaaaatcatgtgcaaaggcacaggaaggggctttctactctgcatcttaattgtggtgtggtcacacaattgtatacaaacgacgaaatttatgaaattgaacacttaaaattagtaaattttatcttgtgatcatctcaagaagcaaaaaataggggaacagtcagtttggtcattttcatctaacaaatgccagagttcaattttaaattgtaattggagaccagaaaaacattgccaaaagggaaaaaagtcctcctgtgaagctcccgtgttgtgcagggcaccatatgtttcaccacctgagacaagagctaatttatggttagagcgtttaaagagtccaggttttttggaaaaaggaactatatacgagttaagcttctgaggaagacttaagagcattctttctccacattccttctcgcacagcccagaactagtcttgtaacagaagaaaagctatgaaagaatcaccctgaaaaaccaggcttctttatgtgcaatgagaagatttttcatctaaatatattatctgttaaaaagtgatcagggctgacagcagcagtctgttctgtggcatccacagcctctctatggtgttcccacggagaattctggtaataacagataccatatttttgcagtaccttcaagggttgttttaaagcagaatgtacaattcacctcttcccaggtgtcatcaggatgtgaacatgcagcactttatactgttattacattttacatgataactctttatataaaacataaaatggctccagaaaaatgattttatatggtacctactctgaaaacctaaacaaaatggtgcttgttattacattggtgttgtgaattacttgaactattacgatagcatgtttcactaaaacatatttcagtagtttacttttggcataatatctgcagcatggagaataagtgtcatctcaaagtagaaaggcatggcatttttcttaatgtgtctttcagactcaaagtttaaaacatcataatatttttcctgtgattgctactatttttatattcatatatctctacacacacatacacatacagagacacacagatacatacagagaaagattattccccaaaatgaaaatatttactttgagcaataaaattaagggtgagttggttggttgatccgttttgctttgcttttttgaaatttactttaatgttgttatactgcctgtacagtaacagggtgcccctgctaacacatttctgacattgccctatcaaaatggaggataaacattgccacagccccaatgaaagaaaaaatgtgttatcaagcttttaagtgtatggggtttaaactcttctcatgttacatcagatctttactgtaaactagccagaatatttcccagcagaaaatagtaagtgtgtcttcaactgcaaagagcacttcataaaactcgtttcactacaaaacagagtaaacagtcttttgatcccttctttttccccacctcaaaagttaaactgccattccttgtttccaagactcacagtagtaaatgttttgaattttccgtgttggaaaaattctgacatggcattatctactacccccaccatcaaaatgaagatgggactatgtgtctatagttttcctcgtaccagtggccattttcccaagcaaggatccagaaatgtgtattttcctcttgactctgccatcgattccctgtttatccttcactgaatccttctttccctacatttccttggctccataatggacatattggctcactttaattaaagattcctgagtgaccctgatccttggatgaaaatctgaagagagggataaggagtaatgggatgggagtaggggagtatcccacagcagtattcaggaaacaaaccttcagcattcaggctttgtctgtccccaaccaagccagcacaacctcctcctcaggggctgcacactcggccctcaaatgggatggtattgagactcatgttgatggacagaaaccaagaaggaagagaaagcaactgaaagagggaatgtccctggcttctcatcatcataagtacttgaggtccttagggttatgggtccttactgattgtctagctgtaaaatctatgctgttcgtctctgttcagcaaggagacacaggtgaaagctaggtttcctggcctcctgattctggggttgatgagcatcagaggagacacccagcctgtctgtctcccccattgcttatcagcagccccttcctcaggactctgtgagtccattgcatccagccttttccatagtagtctcaacattagtgaacttttaagccttctctgtcttctgtgcaactcctacccacatctggcttctgaatttgagacgatctgaaagcaaccacattcaaaagaaaacagaaaaacattttagttctcttggaacttactgtataagaaactcatgtgctttgcggaatatttacaagtaacggttcttcagattaagtagaggtctcagctttgcttttggccgttaaactcggtagtcatttgtagctctgttctacaaagcactgatgagtatcctctaaataactcagctttcatgttatgaagcagactaattctcataccacaggtaatgagccctagttttgaatcaaacgttttgatttttccagtttggcttattttctgaatttaaaagtaccatgcacaattatatgtagacaattaaagtttgaaatggttcctaagcacaatacagttatctctctgtatccatgggagattggttccaggaccccacccccaaaacacccgccatagataccaaaatccacagatgctcaagtccataatataaaatagtgtatttgtatataacctgtgtacatcctcctgtatactttaaatcatctctagattacttacaatacctaatataatgtaaatgccatataagtagttgttatactgtatcatttagggataatggcaagaaaaaacagtctgtaatgttcagtgcagatgcaactatccttgttttttcctcagaatattttaaatccatggttggttgaatccagggatgcgaaacctatggatacagagagccaactgtgtaaatttagttttgctttttatttataagctgtggaggccaaaagaacctagctgttaaagtggtcatctttttcaattcatatgactgatcagaatcacaactcggatagttttaaaataagctgggagactccctttcccttccatcttaacgttttgataccaaattattttaccttaataaagcgagtgtaacactgcctccctatagtgaatgcacagacttctctacttatcctgggcctggacacaacccaactcagtgtcaccaagaatccaaaattgaagtcaaaaaaagaatgtgtcttgtggttccaaaaccatggaagaagaaaaaatggattaaatggttaaagaggaagcttagggctcattggcattcccccattccttgttttagacgtggttattatcggtgggtgaaattagcctcagcctctctgtagacctccagcatgtccttgttgctgctgtgacgtgggtttgcagggtgaatttaatcaactccaggcttccttactgccaggccaaggctgccagcctcttgaaagctcactcgtttcagattttgtttttttgggttttctaattttttctaattgagggcctgaagccattatttaagacttttccaaacttctcttgccttcaagtgttcatttgactattttatgggggtggggggaggtggtattgtttgtgttttctaagcaaaccaaaattacatattttttaatctgtcaagttaacctttgacaaaagtttaccttaattcagtaaacatatttgtactttggccaattctgaattaacttgaaaagtgttaagatatttttaaatttttaggcataaatatagcacatatagagttatgagaattgccttttagtttacttaaacataaagatactcatttcaagtttaaaatgtaaatgatcttgtgacgaatgaggctattcacatttcagatgaacttgtttcaatactttgaggcactttctatttgtcataacttccctgagattgagtcactatgttttactcttatttatccacgtatgtgttcatttttatacattacattttcccaactctaaatcaaaactgaatgccaaggatattttgtttttggttggacgaggggagttacatttaaatgagaagactattaaacctgctcttctgaaataattttaataggcatatgtttccagccctgcaggtttaagagcctagtctaatggaaggggcacacgatagcaatgtcctttcttaaagggatatcacatgtttgtgaagccctatcagttgtgcttcagcaagggctctaaatggagtctggcagctctcctatttgcacggcgctgtctgtctcagcaatgataagcaaagacaggctgactccttcaaggagcctttcataaagtctcagctctcaaacgttccgaaactcactggtggactttcccctgtggaccattcatttatcaggaaatgaaattggttacagggtttctcacgttgccaaacctcactgacgaaatctggtttcttccaaagttcaggaaaagcatttactctattttgctgttcactacttcttgtctttgtgggaaccacagtcaatacaagggtttgagaactccacaggggaaaggttggagtgggaggtggccagggagtgagtctgggggctactttcatagatatcaaatcccatcccttttgaatgggattttttttttatgttggcattttcgtctttcaaactacagtgtcagtttcacaggagtgattttttccacttcaaaaatgaaatcctttaaacatgacacgaatcaccttattggcagcatagctttgtaacttagaccagagatcattgtttaaacttcgtgaaactagaaggaacaaaaataaagagaaacatgtagttgtatggcacagagaatgtttggataagtgaaggttaaattattacaaagtatgtaatctagttcatatgtttaaggaatggaactaggctaaattatctaaaatattctgacgtactgaatcatttcattttgtaaaacaaaatctgactagcagggcattctgttgtaggccagtctgttgagtgcagtgtgcaacctcctgtgtttggaattagcaggcccaggggtaaggcgcagcgtgcatgtggcagttattatggctgtggaagtggttgctagctaattgatagcagtagcagtagaaacaaccttatttaattttcaatagtccctatgacaagacgctatacatgggatcctttgtagtcttaccattattgtcctttctctccctgccattaaatatatggtagttaatatatacacttgatgatattaagaaatgaattccttttactcttttttccccctttggagcggcttcacatttgacttctaaccctgattattttaggcccccaagtaagtagtgatttactatcagtgagcctgttacccttgactgttgtagctccgatttgctaaaaatgtacttgtggtcacaaagccacctcttagcctatgctggctggtggttttgctcataatctgaaccccaaagagacacactggttccataaagggaaaatgaatgaatcgtcttctctgttcatcacggggagataagcttttgtgaacttgaattgcctttagagcattgtgtccgtggtttcaattgtatcacagaatgttacacagactgaagttaagtggttactttttgtcaggggttatcttatttttctccattcagtttaacatgtgtactgcaaaagacagtatttttggaaatgaaggcatagtctttcatttaaacatgcatcagagggatttcactaatgaaagcattcaaatcatgtgcctagttcttgtttctagcagcctctgccattaaataaatatcagtcttatcaaattcatgcattcaacatttttcctgttgatacaggcatgaaaaataaaagcaggtaggcactataaaagatttgccttcatctttggtgatctgtatcccagccctaacctacaggaactgaaaatgaaaaatcagtgattatttttgtcctttataaatggtctgcacattccaccatacagcctctcattgctaacagtccctattgaagagaaaacaccaaacccaatattgagagtttttcaaatcagggcacaatggggtataaggaaccatgtggactcttgatcattatatttatttatggtgttctcacagtctttaggcctctgagtctttgaataaatatctccaacatccagcggctaacattccttttcctacaaagctactatttgcaatagagattttcttgtctttcatttatttgttcaactagtattgattgagcaactcctgcctgcacagcactctgctagtggttgtcccttaaagaaccttactgtttaggggggcacagtttctaaagtagcattcaaagaaacggcttctctactcccttccttttcaaatgtgaggaacttaagaaaattagagaacacaaatgggcaaagggggcttgggaggcaaaagaagactgttcacactcagaggactttgagctgcagtggtttccttgagtgtgaaatgaagaatggctgtggacagaatgcagattctgaagcacataagtggagaggcaggtgggatgctggagggctgagagtgagtccccagtcctgcagtctggggcaagttatttcaccttcactgtgcatcagtttctcacctcaaggacaggtctaactcatcaccttacctacatcctggaatagttggagaaatcaaaagaaacaatgcacgtaaactccctagcacaaagcaagctctcagtaactgttagccaatgttagtttctcacatatctatcaacctcacttttccagaacaaagccaaaaactagagttgtagattctgaacaatcaaaatggatggctcggagctcttgtcttgtactttattaatcagggagcctcttgctcacagccatactctttgcttgatacaagttttgtttgtttatttgtctgtttttgagacagagtctcgctctgttgcccaggcgggagtgctgtggcgcgatcttggctcaccacaacctgcaccccccgggttcaggcaattctcctgcctcagcctcccgagtagctgggattacgggcatgcgccaccacacccagctaatttttgtatttttagtagagatggggtttcaccatgttggtcaggccggtctcaaactcctgacctcatgatccacctgccttggcctcccaaagtgctgggattacaggcgtgagccaccatgcctggcccaatacacagttttaataagcttagccatctggttcccaagtccataatagactagaagccacaacttaaaagaactgctacaggttagtacactaacagttatgaaaatcaagggccacttgttctgattagcaagggagcaaaacaacacacatgagtcttacttttataagtatatgtgttgttttataaactaaacaacacacaagccttacttttcagtatcttataagaacttttacatgctactcatgaaaatataccaaaaagagttgtgagtctgtggcagtcatgaccctgaagaaaagttgggatgatacaggacatagagctggtatcatctctacccttgagaaacacaaagccctgtctttgagaatagcgagtgggtgacctaagcccaaagaaggctcaaggtgccagtctgaactttcagaatagataaattgctgaatgattttctttagcaggttagttttctttttattttactttgggagggatcatagcaagattcttgtaaatgctgactttaatgtatgatttggtgtataacaatttagtttattcactattttccatgaacacgttagtatctctgtcaagactaagttgtctaatttaactcacgcatcatcccatctatgtaggtaattattttactaatgtgttgtcaaatgagggtaaactaggctaactccaaagatcccttcttccataatcaatttattatacttcttttgttttgcctgtgtctcctcaatatacattctattctcacaataagcaaaaactgaaaacttgacattgtaaactttctcctggttccagtgtttgtatttatgaaaaaacatcaattccatgcagatgtgttcatgtgaactatttagaattgaccctgattccgaatcccataagtgacactttccagtagaataaaaaagatggcttggaatgtaatcacttctggagaggaaataggagaagctgtttccttcttttagatttccactcttttattctgctgagagagggcatagaaaaagggaaaaaaaggaatttctcctcatcctcagcatatgagagctgtatgtggctttttaagtttttaaaaacgcagccaagtgtcagggtacccagttcatttttggagttgttctggcttgtcatatactcctcacctccagcagtccagcctaacaaaagctgttacaatgacttaaaaacaatattctctggagctcctttcatttctaaggagcagcatcaaactgtgccccttctccattgtaagccttaggatttgtgggaaatgcttttgtttaaagaaaggtatgaaggaaccagtcatgaatcttctgttcctaaggaagtggaccaaaaaatatcctttctctcagcattagttgttagaatggagaaagaagagatacttgagaaaccctcttttcaacccccttattttggggaaatgagaattgcctcatccaaggtcaccaggctggtgggggcagatccaggctcctatcctggacttcctgactgcacctggtcatgtccctttgtactacacatggcttttctctgcattcaagggacactgtaactgttaatatcagtccacagtcccctctcaaagcagcctcaaaaaagcttgaaagtccaactattactagtcattgcccctgtgctattctttgtgtagaaggatgatgccatgagttttggcttgatgtttatgatgtatttatgttaactcaaattctctttcattgacctatcctctttgtgactaatgaaacgcctttgcaaaagggccagttttggaggggtgggtgttctgtcagcagtaacatctcagatctgtttatgccttggagggaccatgtcctcaggctagatctcgggggctcagtattctagtaccataaatatttttagaactgtctttttgagttctactttcatgcacatttgtgactaaatttaatatttttaactggcatactttattttgttatgtgttatttaactgcaagttgatctttaactggccatttgagaggcagattcttctgctctgcccctgcatgtggcatggacaattgtttcaggataacgttgatccctcccagttctctgaacatggcatgcacgctcccagcctcagcctgtgcttgtttcccacgagggccagcgaaggccagagattctccccaagattttcacacatcaccccactccttccctactaaacttccgtaacactcacatcaccccactccttctcctaccgaacttccatagtgctcacatcaccccactccttcctctactgaacctccataacacatcaccccactccttcctctactgaacctccataacactgacatcaccacactccttcccctactgaacctccataacaacactcacatcaccccactccttcccctactgaacctccataacacatcaccccactccttcccctactgaacctctataacacatcaccccactccttcctctactgaacctccataacacatcaccccactccttcctctactgaacctccatagtgcccacatcaccccactccttccccaactgaacctccatagtgctcacatcaccccactccttccctactgaacctccataacacatcaccccactccttcccctactgaacctccacaacatatcaccccactccttcccctactgaacctccataacactcacatcaccctactccttcccctactgaacctccataacactcacatcaccctaccccttcccctactgaacctccataacaatactcacatcaccccactccttcccctactgaacctccataacactcacatcaccccactccttcccctactgaatctccataacactcacatcaccctactccttcccctactgaacctccataacacatcaccccactccttcccctactgaacctccataacactcacatcaccccactccttcccctactgaacctccatagtgctcacatcaccccactccttcccctactgaacctccataacaatcacatcaccccactccttcccctactgaacctccatagtgttcacatcaccccactccttcccctactgaacctctatgacactcacatcaccccactccttcccctactgaacctccatagtgctcacatcaccccactccttcccctactgaacctcaataacatcaccccactccttcctctactgaacctccataacactcacatcaccccactccttcccctactaaacctccataaccctcacatcaccctactccttcccctactgaacctccataacactcacatcaccctactccttcccctactgaacctccataacacatcaccccactccttcccctactgaatctccataacacatcaccccactccttcctctactgaacctccatagtgctcacatcaccccattccttcccctactgaacctccataacatgtcaccccactccttcctctactgaacctgcatagtgctcacatcaccccactccttcctctactgaacctccatagtgctcacatcaccccactccttcccctactgaacctccataacactcacatcaccccactccttcctctactgaacttccatagtgctcattatctacaccatttattagctgtttagtatatgctgcttctggtaagatcttaactatatttcctttttccaaactcggttgtaacacctgatgtcaaggacctgctatctgcctttttatatccccagtaatcagcctgggaccctgtatacaatagacacacactgcatgtatcttcattgtgatgggatgaagaggtatgagtggccaaagtacaggaggctatgttggccaagatgcaagtatgatagccaccttgtaagctgtaacaatatccagggaaggtttgatatagggcaagatcagggataagaaaagcagtaaagaaggtatgatgtggtcatgaaaaccttaaaaaaaaaaagaatccaaattgtacagatactttggaaaccagtttggcttatctgctaaagtcgaacagatgtatatgcatactctctcccactcctaggtaagcatctaacctaaatgcctgcccttgcacacgaggagatgtgtaagaatgttcatagcacaattgttcataacagtccaaccctggaaacaacccagtgtccatcagtggtagaattaattaataagttgtggtacattcaggcaacagaatacagcaatgaccgtgaatgaatcacagccaaacccaacatgtttcaatctcacatgcataatggtaagtgaaagaatccaaatacagaaggttatacactgtgtaattccattaacataaaattcacagatagaactcgccgagagggctatggaatgcaggtataggtggtaaaagtaagtataagaaagagcagggagcgcctaccacaaaaatcagggtggtgatggccagggagatgggagagagttccctgatcaggctggagcagtaattccataagtgttcaccttctgctataggttggtgcaaaagtaatcgtggtttttgctatatggcaaaaaacgcgattacttttgcaccaaccttatttagttgttacacttttacacttgggaacttttcggtatgcatattatatttcacaaaataaaagttgtttttataaagtggggaggagcggtccatgaaggctcctttacttaaaaagtgaacaaactatggtaagtgatagaaatgttaaagggattccaatgaaggtaaaaatcacctatggaaaattattctccctctttccatttgcatataaaaatcaaatgatttcacccgttttcgctctcctaagatgtgatctatgcccctcactaaaaggactagaaagagatacatcaaagtatttcatagttgttatatgtttggattgtggaactaattttagtgataattttataagccctgtttttaattttttttcagtgaataatatatttgattttactacaagcatgtagttaaaaaaaaaaattgaggccgggtgcagtggctcatgcctgtaatcccagcattttgggaggccaaggtgggcagatcacctgaggtcaggagtttgagaccagcttgaccaatatggagaaaccctgtctctactaaaaatacaaaattagccaggcatggtggtgcatccctgtaatcccagctactcgggagggtgaggcaggagaattgcttgaacacaggaggcggaggttgcggtgagccaagatcgcaccattgcacttcagcctgggcaacaagagcgaaattccgtctcaaaaagaaaaaaattaactgtttcactagaaaaaggaaaacatggcctaggcaatatgagttagaggaagttgttgtcatgaatgtatggacttggagttagcagagttactggttttaaagcaaataggaatgggaaaatagtttatatccctgatttctctaaaatcaagacccaagccttctgtgggtattttagtgacgtgcagtgcaaagaagcccaagccaagcttgtgatttgtctgtgagcacttgcagccaatttgtattttttagttactctctctgatctactaatgaagtggctaaacaagtaacttttaagcataacttaaacagttcaatgctttcagaaatgagtgtagctaatttaaatcatgtaagtaagtaaaaactttgagaaaacaatttgttaatagcttagcaacccttggggatagaacatctgtgtttttaagagacaatgtttagtcatgaagtgactataaattcatactagatacattatgaacaacaaagaggttgaattccaaaacagtatttgaaagtaaagagagaaactacaattttgaacatggtaaaaattaaacctaaatttattttagttgcagatttagaagtgtgaaaaggaaaaatatatacgtattttgaacatgctatcccagtgatttattaatagagcttaatacactcttgctggagatttcaaatgcctgctagcctctccacatataagtgcaaaggctaaaacttcccttgcatcagtctagctagttttgtgttatttttagttttcaagtagaatttaatcaaatagatcatagagcggccctcagaaagtgaatgggaaatttcttactgttaacagtttctttagggagtatgaagtcatagaccctggtgtggagagcttcacagaagtggatctattttcagaattatgtttgatgtgaatttttgcacgtttacttcaaaggcattttcattataagtgacaaatgacttctgaggaggatagaataaaaagattagcttaaaataattgaaatctgagaagttaattttgttgaccaacgaataggtttatgaagcatcccattttgaaatcagaaaatttatatttccaaactcgaatctgcctaaaaatgctacttttccaggcatggcagttgttctgattagattttgtataatgtacatgattagactatcagtttcatgtaggattctatataggtttataaattgtaaactctcagtatataataaattaaaaataagaaggctagtccttttgggagtgactggttctactgtctcccttctaaaagtaaagttattttcattgtttttgcatacatgactgtattcagattttttcccaatgtctaaagtgcttcttccctacccaaactcacccctttctcttagggtttagaaattattaccttcagccaggcaccgtggctcacacctgtaattccagcactttggaaggccaagtcaggtggatcacttgaggccaggcgttcaagaccagcctggtcaacatggcagaaccgtgtctctacaaaaaatacaaaaaagttaaccaggcgtagtggcaggtgcctgtaatcccagctacttgggaggctgagatgggagaatcgcttcaacccaggaagcggaggctgcagtgagccaagatggcaccactgcactccatcctgggcgacaagagctaaactctgtctaaaaaaaaaaaaaaaaaaaaaaaagagagagaaagaaagaaattactaccttctcagcaaagcctttccaaccacttagcagcccagctattagagcacttcatattttgaattatcaccttgttgtatggttgtggctgtcccattagagaacatggtccccccaacagtgactgtcctaaaccacatttagtttcttagtcctgtaacagtgtttttcatgtatatatttctttagttctgttcatatatctatttacaaaatataacttatttcccaaggtttttagtaagagggaaattctttaggcatggatttaaaaaaaaaaaaaaaaagaaaagaaatctggcttttctcttttgattaattcctaatcttgcggtttcactcatccttctcatgtggtttctccctggacagacctgtgtcaggtgtgggaaattgggcagagaatgtaataatctcagtggagggttctgtagcagttgttttttaacttgctgaatatgtgctttttctcttatttgttcctttgtcctaaaaataggtgtgctttagtgaaagttccaattagtagggttccatttcctgtagattttgctacactggaagtgagaggtggctaaaaaccgatcatggcaaaatattccagacacagaaagctcctgcacagggagttggttgccttctgcccacagattaaggggtattgcctcattggctttccaggtggattataatctccttcccatcacgacatccatttccaccctcattttcaaaggtggaaaggaaacaggatgaggaagaatccctggggtgaaatttgaatgcacacttctgaaggggagcgactttttctaaactttgtaaagagggtgacccctcactgaagtcagtttttctaagctggaaccgttagccctagtgtgttccaaagactcctatttcctttccaaataattcaggagtcaggtggaggagaacaaatggcaaacagcatggccacccgtgtgtgttctgtgcatggcagtcagggctgggcactgtgccgttggtgcaaagcacctggagtctagtccactttaactcttgtctcgggaatcttaagggctcgtggttttccctgaaacctgtgggaggaagcttgctggcttcacatttatggcaggaggaccagaagagtccatcagtggctgtatttgcaggcctcggagatcccacagtcaaggcctggggactgactaggtcatagtcagcaggtcctgagctgggctagataagagtgtgcttcctagactgtgatcagaaagttaatcgttggtgacagtgagtctgcccttgttcctaagccattgttttagttttgtaagatttatagggctgacaatcagattaaaatgtatagaataagtaaaacctccttccttcagaaatgtgtattgggactttctcccagtctctctctccccgttttctaacctttgaagataaaggcaggagaattataattctgacaagccttccagacagcttgcttaatctgggctatgaggctatcaggcctggaggcttgtctctgcagctactgctaaactgaacatccaggcaccatgaggtcagctgcacagagaccctttcccagaggcaaactggctcaaagagagaccgtatcagaaaaataaagacttattaggatggagccagatggaggatggaaacagaattttatttgtgtgctcttttgtttctagggaaaaacaaaagcaacacaggtcactggactctaaacatatgaagtttgactatttacagaggaagctcttggattcatttctagatctcttccttcccagccctgatttccttccctttctggggagaggcagctgtgaagagctgccaagtctctctgcccactcaccctggtggcactgccagctctcctctgttcccactgtcatctttgggtcctggccctcagcccccatcgcctagaccctgcactagtcccccagctgctcccctccaagggctgcttccctcccatccagagggaccacattgtttcccaagtagtctcccaagagcacgctgaggtcctgggcacagctttgctcaggtgcgtggagtggccccactttgtatgcagaaaagtctaggctcagtctcagcagatctccataaacctgccttccaagctattttcacattccccctcttattctcaaacacaccggctggtccgtgggcacccttgtgcttttctgtctccctgtctgtgcttctattattcctctgcctgggatgcccttccccccacctccacatgcccaaatcctaccctttgtttacagaccacctaggtgccttctcctccttgaagcctttcttgatgcttccagtttaatttctcccttccctggatccccacagattacacttatttgcacacttcagatgatattatcacctcctatcttgtctgatagttatttttgtacatgttttatctccatgtctagattatgaacaccatggttcggaggcgctgcctctactttttggtatcttctgtggcagtggtttccattgagaagccattgagatttttttaagcacagagtaacatgatcaggtttttattatggacttttttgttcatgcccccctcactacccaggaactgctcagaaagggatggttcaaatctttttctcagccaggcttctgaacaatttccctgactaggcagtgccttacacttctctcctctccatcaggaccaccccaggtgaactatcttgccagcatcccctgactgtacttttcacggtctctctctctctccctccttctccctctccctctctccccctctctctctctctctccctccttctccctctccctctctccccccacctccctctctccccctccgtctctcccccctcccccctcccttcccctctcctcctctccccctctccccctctccccctctctcccccctcccttctctaagccaccctgtggcagagggtactgttcctcactcagcaatgcctgacctggggctgcatggcacacagagagcctaccttcaaatcatttatgtccagtagtgaatggaaactatccaaacccatgtccagccaggcactttgtaggaaatatacaggtaatgctgtaagcaggcagatactgggcactggagaggaccacttaagactctggagggagggaagcatccgcaccagcactgtaggaaatggaagtgtggtgggaaggacatcctagctataaagagacctgtcagaaaaggcatggaggcgggcatttgcctgaagtgtgcaggggaccccagggagctcacctggcagaggctgatggtttgcttaaaggagaggaagcaaatgaagctcagaggtcctgggcacccagtttgtggagactccagagtccatacaaatcagaactggcaattattgcattgtactttctaacattaggttatgttagaggattgctttttagtgattttttttcatttgcatttatcttagctctccaagtaaatgttaagatccttaagggcagggaccatatttcatatttttattaaatgcttttatggtacaaaacgtcaccctataatttattttattctcatattgggttttcttaaagcagggtaaaatgttcttacctgtttaattaggttaatatttaagagtgaaaatatataatgtccagaattaacatcaaactaattcagaggagggaagttggggtagcttaaatgagtgcccatgagttaatggcttgtagctggttgatgggcacacagtgttcactgtattattttccccactttggtgtgcatgggtaattttccataataagatgttgggtctccggtggtactgagtaagccttcagcttgcaggactcccagcacagccccctccctcataccaccacactgtgtagcagccacctgggcccctaactgccagctgagccccttgctacaggcctgacttccggaacagccaggaaaacagctaaggatcaaccattgtgttagggtcctggtacagtcacagctcagtgatgcagacccatcaaccaggtggcaaagatgaccattattttgtatcaccattgtatttgttaaagcactagtgattacagttataatgtaaatattaataaaaaggaaagaaggatgcatgggtgagcaggtcaccttttgtcttagttcgctggggctgctataaccaaatactgtggaatgggaggcttataaacaacagaacttacttttcactgtcctggaggctgagaagtctaagatcaaagcaccagcagatttggtgtctgctgagggcccactttgtggttcgtagacagcaccctctagctgtgtccttacatggtggacgggactagctggctggctgtggtcttttctataaggacactaataatccttgcaagagggatttaatcagaagttttatcttgaaacatctttcttcatcagaaagtgtttcgtatgcacttagaggtagaaaccatagaagatgtatttacagtataagtttctctttaaataagcacatcattctgtcttccttaaatctgctttttcattgtacaagttccaaaactcagatgttgtcaccccttttgtgctgagcatacattagttctctctaggggaaatttagagttttcactttttcttatgtataacaaattttgatttaaaaaaaaaggtatgttctacatcctcttgctctaaataaccccaaatataagtgtcttattatagtatgttgattatttaaatttggaatttccttttgaaagatcctttaaaatgttttatgggtgtttccaaggtaactctcaatgttgtttaattttcatgcttacagtgtataacaaattgaattatctatcattggtcccttaagagataagcagtgtgtctttctttattgaaatatgtaaatttgtgtcaggcagtgtggctcacacctgtaacccaagcactttgtggaggtcaagtcaggaggatcacttgaccacaaaaccagcctgggcaacatagtgagaccccatctctataaaaaatttaaaaatttgccaggcatggtggtgcagacctgtggtcctagctactcaggaagctgaggtgggaggatcacttgagcccagaagtttgaggctgcaatgaactatgatcatatcactacactctagcctgagcaacagagcaagaccctgcctctgaggaaaaaaaaaaaaaagaagaaaaagaaaaaaatgtaaatttagcaaaattggagcctgtgttataaaatatgagtgcttgctcttaattccttgttttgaaaatgactagagatctccaaatgcttcatctacagatgttttacttgccttctggggcattgatttgaaaaaaatcatgatagagaagggaaaggtcttgtattttccagttgtcctttggctttgaaccttgttccaaggcagaagatggactcctttgaggcccttctctgggactgcttggagaagtcagagcaaggtgctaacagagtctagccagcagttgtgcctggccctcactgggcctctcagccctgcctgcaccacctcaacatcacagtcagtcttcagctccagtctccaccagtcagagcagacctcatcagccgtaatggtttatagatgaagtaactaagtgtcaaagagggacatggtttgtccaagtttattagtgtcagagccacctctaaaatccagacgtcttgaattttccctccatgataccattcatagcctaaatgggagaggtacatggtagtcttaaaagtttacacttcgttttcatggtatttattgaaatttcaagtaattgatcagtgcgacagttgccatggggagcatgaaatgccagctgcctactgctcttctgccttccagcctgtctaggctgaggagaggaagacagcagatgtcatggtggtgtgcctggtgcagcttcagctgtcagactaggaacaatggggcagggcgactcctgggccactaccaaaccccccgccccagttaacatatggggcaagtgggaatgagcatgactcccagctcccttgccctggctctttctggccccatcgtgccacaggcctgcctgggaaacactgtgcatgctcgtctgtggccctgcctgagccagcccctgagcagtgtccacgagagacctgggctcaaggagcagcagtctgcagaggtgaagtccttcctctctgcggtctctttgtctgattggtcagcatcactgctttgccacctctgaatgtactttccctctatcctgcccatggtgttattgctagttcataaagttgtaaactgtgaaactgctcccttcataagaaaattaccaaaaaaaaagttcagatcacatggatttataccagtgcagttaaatttctagcctgcccaaggccagatcaagaccctattttggatatggtgagccaggttttacattgctaacacactgagatatgaaacttacgacctatgcctttttgtacaggaaagggtaaaagcaggaattggcccaggccatggctcatacctgtagtcccagcactttgggaggctgagatgggcaacagatctcttgagccccagaattcaagaccagcctggacaatgtggcaaaaacatgtctttacaaaaaatacaaaaatgacccaggtgtggccgggcgcggtggctcacgcctgtaatcgcagcactttgggaggccaaggtgggcggatcatgaggtcaggagatcgagaccatcctggctaacatggtgaaaccccgtctctactaaaaatacaaaaaaaaaaaaaaaattacccagttgtggtggcatgcgcctgtagtccctgctactagggagtctaaagtgggaggatcgcttgagcctgggaggttgaggctacagtgagccgagatcacaccaatgcactccagcctggccaacagagtgagactctgtctttaaaaataataataaaataaataaagcaggaatcatgaatgaaaaagaataggcttttattaatggagattcaatctttgtttcagcttacaaatacgaatatttttacactcattagccctctgtgaagattctcctctcctcagtggcatgtagcctgagagccaaatcctgtttgatttctgatcacatcacctgtcccttgcttattagctttctctactttggttttggaaaacagagtttcaagtattctctttcttttctactctgacagtgtcaatgaaaatggcctgtcttcagtggcttttaggggctctgtggcaatgctagcagaaagcagggcctgagcccatttggtggctcttgagtctctgagttgtctgaagagtcctgcctccatttcaggaaagtgggagcagagggtgacagctgaagagacaggaacgacttgagaaaccccaaagtttccttcagcctgcacctcccccagccccctcattactcacttcccctagccaggctcacgtggctgctgggctgagtcgcctcagctgccgtggcagtgtcaccacctccatcctcactggccagcagcgggaagccgttgttccattagagtcagccgctggttgcttgttcatcttttggtgtgagccctcccaggatatttcctggaacgctggagggaaacatttcttcacccagcctttccaggcttcagctcatcgtagtctttgccttcccattctcacgaaggcggggagacctttgtccaagaaagggaattcaggttactcacccacagcatgctgctgtgctttcgtttagcattctgcccatttggccctcggcattttgggaagctctgcagcttggcctggggctactaatgggcaggatcccacccaatctgttgagaacctcaaagacagcatcactgctgtgggttaggaaggactcttggcacctcgtattcagattctgtctctcattagtatcatcatctttgaagacagacagcagaattctccacttttgcccccatctcctaccttggaatcaaaatattctccttctcccagcctcctaagtaggaattgatttgcatcaggcagtttgactcagtaatgcagtcagccttcctgaggagttgacgcgtaggcaacttcacctggtgccccgcagctgatggcttttagatcacgagtctctgtcctccatctgtcccctcgactctaggcttcccaggtgaacaggcttccctcaaggctgcctccgtgcctccacccacctctccaaacttacctctagccacacctcactgcagatcggccccagaagggtgctgtcagcctctgtctgctccagagggtccctccacatgcagttccagcaacccccaccccagccctgtctccacaagtcacaaccctgcccacacaccaaggcagcaggagagtctgtaccttcccaccagcccccagaaaagagagagaaattgaaaaccgaagattaagtttctctcctttctgtgaatccccttagcctgggtctgtgacagaggtcctaccagggacatttgctcaagattcagactcaagggggcttccagttctagccaatgatacgatggtttgtggagagcttgtcccgagcatggggctccactttatatcctccatgttttcccgaagagtcttttcgcccttacttacaaaaactgttagtgtcacttgtggacactccacagtggtgaaaccatttcctgagctcaggatccgtgtctgccaaccttgtaagtgcccctcttgggtggtaacttagtgcccagagaccccctgcccaagtccctctgtgtcgccagccatggtgttcctagatatgccatgtgttgcaactgtcttttgagccactctcatgatgggcttcttaattttaactttgtgtttcttaacttgtaacttctaataagtggtcctttataatttcctatattttaaatttagttctggcccagcacagtggctcacgcctgtaattcctgcactttgggaggccaaggcgggcagatcacctgaggtcaggagttcaagaccagcctggccaacatggtgaaaccctatctctactaaaaatacaacaaattagccgggcgtagtggcatgcccctctaatcccagctacttgagaggctgaggcaggagaatcacttaaacccgggaggcagaggttgcagtgagccgagatcgcaccactgcactccagcttgggtgacacagcaagactccgtctcaataaagaaacaaataaagttcttcattaattgtaaaattaacataaaatgaaacttttccacattcattgctgatgttattcatagaccagtgcttatcttctttttgttaaattataatatttcatagatttgtcactccctccattacacttggaagagcctgcacttcagtcttgatcaacaatttagctgaactgatgattcattatttctcccagagtttgctgtccaagcccacgtaaaacctcctggccccagtattcgccagaactacctgggagagcatcgtccgggagcaccacccacctcccatcctgggtcatgctccccgcttgttcttgtttcctcccgctaactgacgcaccctgttcaaggagcagaagttattcctctctttcctctacagccaagcaaatgcctcctgtttagctgaagcccaccaacatttggtttaaggacttatcattgatgaactaaagttacacagcaataggatatggaggaggaatgatagtgaggctacgtaatccccaaatttatccttcacccccagaattaaaaaaagaatgtaaatgcgtcctctgctattttacgacaggatctccaaacctgtgtagttttcatctgagcaggactgcccaccacaagccctgcacgtgctgtctgtagtcactaacccatcactcccgacctgcgccatctgccaacagttactggtctgccttgcgaccagcaatctcccatttccttgtctattcagaggcttaatatggtcttgaattttttttttcaatctgctatgtagctattggattttaaattgtattagactctggacctgtgccaggtgcttgctagagtttctgatgctatcttatatcatctttaggtggaagggggaaaacgccattcaactttcgtggtaataaaattattgcagttgtgccctccatctgttcactgaacttcctgtgggttttcaccagatcacatgactgacagcagagatggctttcaggcttttggtctgcttgttgcacccaagtctcaaccaccaaaccagacccttgctttgtctctgagctgggcgtccggatgtcccactgtggtaggttgactcactggagctgataaaaacattccagccaaacttgagagtctagcattacctctggctccaaaaatcaaaacaacaggattgctgtaagtagctttggattgagaccaagctacaagcttgagggatgagttttctctctttgttgagctgtgtcacaggacaagtatctcggaaagagaagcgtgaaagccaggggctcctcaccaaagtagcctgagcttgagataaccagtgccctgccctgtgccagccagttctagctgaattcctgccatgactatgagatccaagcccccgatccttcccaggcacctcctctgccttcccagagctttagtctaagtcctcaaagcacgttgacctgagagtcactagctagagcccaaaggggttcttagaagcccaagggagggaagatgtgggcagagaagagccagacggatgtcggagttaagagggcctggcgatacctgagcagccggggccctgggccaccaagagggtttgttggccatggcagagatgaagacactctcaagtgaagaagttggacttcccttagcctcacaggatggcatcattgttctctacaaagggacataaaggaaagagtgaccttttctaggttgttgatttgacattcagactgacatttcttggactcagtcctgacaaaatgtgtccccagtgtccttagtgctaaattaaaccttttgtctttcttttccttagtactttagacttctaagacatcttagagggagaagcacatatttttaagaattgctatttaagtctcaaaccatgctggctttctctatagggaggtagatggacaggtagattcggagagggggtcaaattaaattcagctcgggcctacccaggttgactgaataacattctcaaaattcttttatgatttatgcctagtgttcacccttttaaagtgttcccaggcactgcccttacaaacagctcccttcaggaaaaaggaagctccttaccatgtgcttccaggtgtttactctgtgtagccagtcctggagaacatgcataaataacaaacagagtgcgattaccctttctgaatcttttaggtgctggtgaaaagttacaggcaaacaaccctaaggaacaatctctctgctcccttgctcactgtgggagaggagctggcgctatggttcggggaatgcgcagtgctgtctgcatgttcaggttttccaataacggctgtgtgttcacgctgctctctctacccgctctttcagtccccccatgaccagtagtgcacacttgggagacagcagtttgggaacccagtctgtggaggggaccaggccttcactagccagcacggacgggggcagcgcctggaacctcagcccacttagctgggagctcccaggccacagagcagctcaacagcagcttcaagcttgtctttgttttcagcagttgggagccttagcctttaaaaatgtctattgtcaacctccaggacattcagataccatctccaatgcaaagtctgtctaagtagaaatcaacaaatgcttaacttcagggttgcagctgaacccaggcccaacccattcaaccctttcttcaagtgaaccctgcagagcctagaggcatggcagggaatacacctttagaccttactggtctaaacataaaaccacacctagtcagaattggaaggagctcaaaggtccttcatttttcacaaggctagaaaactgagtcctgagaaatgctatgacttgccccaaactgcccagcttgccacctgctgagccaagacagagccaaggcctcctgtccccagcctgggctcacctggtgatcaaccccatcactcacagtgaggaaacacggccacaaaaggttaagtgagttgttggttaggaggatattgaagaaacatctgaagctcattattattacttgaaagacatgaaaacctagtgtccacgttggccacagacattctaagggcacactcaggtcccttttgaccctggggaggctccagaggaaaggcctgagcttctttcagcttctggctctaccactcactgctgtggcctctttttcatgtgacttattcttttggggtcttggttttttaaatctctataatggagtgaataatacctgtgtcacaggatttttgtgcagattttacgtcattcgttcatttatttaattcctcattcagcaaacgtgccttaagatgtcagtgacatgccagatgctcataaggtccctgccttcttagagccgatgtttgttctagttggggaaacaaatggtgcacaagtcaacaaataagagaagcaccaattgcactgagtgttgtgaaggcaataagccagtgagccgagagaggccacttttgttttttatagggtggtcattagtgaagcaggaagtgcctggtacatggcagctctagtcagagtcatttccactgagcttcctactgggctgtctgtgaacttcaagcagaaggcttcattcctggtcaaccacagcccccgcagccccgtgtggctcagggagttagctgccatgctggatgttgttgaacgtgctgcacgatcttacaggaagatggtaaacacctaggtcacatacattgcagaagttaccccttcatagatggtaaacccttcttagttaccccattagattgcaaaagcctaatgtcacatacactgtagaagttacccctctggactgggtgcggtggctcatgcctgtaatcctagcactttgggaggccgaggcaggcagatcacctgaggtcgggagttcaagaccatcctgaccaacatggagaaaccccgtctctactaaaaatacaaaaaaaaactagccgggcatggtggcacatgcctgtaatcccagctactagggaggccgaggcaggacaattgcttgaacccgggaggcggaggttgcagtgagccgagatcgcgccattgcactccagcctgggcaacaagagtgaaactccatcttaaaaaaaaaaaaaaaaaaaaaaaggaagttacctctctgtccaccttatcataaccataaacccactccagggccaatcttctcccctccagttgagcctgactctgagacagagaaagaaggcagttcttcagcacctgccttctcttactgaaacagctttgttctttaaaaatgttgatgaagatgagctcagtgcctttaagccatttgtcagcacttgtgtctggttttcatgcagggaggcttatttctattattaagagtcagttgccaagtgagaagtatccatttgggtgcataagagaaatgggcttgtaagagaaatgggctctgtaatcacatctaaagactagacttcgctatgaccaggccatagtaaacatcatagtatgtctagtctttaggtttgattacagaacattataagagcatcccttatacttgcatgtcattttaatgtcagtaataatagccaacattcattaagtacttactctgtggtgggtactataccaagcccttcacgtggcttatctcatccgattgtcagtacaactctgtgaagtaggaaggatggttacattccaagcctcagagtatagtaaaccttaagagcctgatctgagcaaggatgtgagactagtccaaggtcactcagctaataaggactggccttttagctcttgaaggctgggaccccatgtgtcctagtggctgtatttttagtcctgtgcttactatacactaggccctcagtaagtatttactgagtgaatgaatgggaaaagatgggactgaaactcaaattatctgcctgcctttggagttgctttttgtagttgtttcaaagatgaaatgagtaactatatgtaaattctttgaatatgcctgccatataataggtaatcaattgtattagctataaatgctaggtataatctcagaatttattatttttatggagaacttctatggaaataatgatcagcttgaagaataacttcataataaaatctacacgtcttctcttgacagataaagtttatactattttataccatttttgtgtactatcatatgctatatactggatgttcctgagattttgtttgcaacatttgaaagccatagttactaccagccaaagagtgtactttccgattagaggaaagatctctgttgctgagagatgtcctgtgcctttgtggagggtgagatgagttattgtttcaacatcaacttgaggcattttcacttctggttgtaccaggtggtgggaaggatagtcatgggggtgccaggtattttttccagatcctcttttgcaggatttaagggcagtctttgactcattactccttctagcggaatagtcatcagagtttccccaaagccatgagggcaggaaaacttactgctagcccataaacttagtagcagccttgcctaagtttctgtaattcagctggaaggaattcttctgagagcagtttacagtttattggttttatttcccattccaccctccttagagatgcggaaagcagccttgcataagctgcctcacagcctctcctaaggccttcatgggaaaacccccatgtaagtcactgaatggagaaaagctttcacatctttgagtcatttttatttctaacaatgagaagtgcgttttaacagcgacattaccacatcgaaatgtaagatgttattattccaatgaaaacaagccactgggggactctgcacacccacctagcccctctcttctccctgagtccgtgtgaggttttctaaagtttgaggccgtcctaagaactaggattttcgtctccattatcatggatgagtttcatttcttcttcacatagcaccacagtcctctcgtgattattgccctcatgtggttctttttttaaggaccagcagcgtgctgagctctgtacctcacacccagaagggtttcgtggagcctaagagaatcaaatttaaggataaagcattagggtggccagaactctgatgtcacttttcaaactaactttgcacacagtcagacccaggctttaaacctgactccactccagcaggctgcatgaccttgcaaccgagcacttagcctctctgagctccgagttaccttctcttcatggggttggcactggcctcagcgggacatttggtgactgaccaggatgccgtgggagcttcagacggcatgatgtatggggagcgcgggtcggtgggagctacttgttgcccccctcttgctacaaatgcagatttttcacagaaaagaacatcatcgtgttggtacctcttagacacctgattccatgacaaagacttccctctaagcacccacatacctgagaaccccatgtcgggctggaatcaacacagtgtatgaggaggctcccaaactctccaggccctaggataccgccccaccagcagttagggaacacccagagagcactgtgcagggcaggtggggtgcaaggggacttcaggagtggacgaggagggagtagaaagctgggggccttaggtgtcagctgagaggagggaaagaataaagaaagaaaaataaagctggggcctcattgaactctggctcatgtcagcaagtgctggaagtggtgccacatcctgagctgatcaaactttgtcagccagactgggccaaagagcccagctaaagaagttgtcccctccattgcagtcatgagcaacatcatcagcagacactgagacttccagcctgcgctgatgatggcaaagagctggaaggaaacactgatggtctgaaaaggcacaggtttcattgaactagaactagtagtttttgaaaaggggactgcagtgtgggggtgcagggtgtggggagatctaggcctaggtagtgctagagcttggcgtctatttatataacagtctggtagccacaaagtggggagctgctgatcactgaagccatagcagatgggggctgtgtgttgaagttacatcaatggccagaacaccctccgttttaggaattcttacacacttgttcaagatgtaactcttgccacaaagtctttgctgcttcactctgctcctctctgatcattctggaactctgaagatccagcacttagatgtttttagttggttttcttaaatttatttttcaaatttaattttttggtttaattatttttagagacaggatatcactcttaggcccaggctagagtggactggcatgattctagctcactgaagcctcgaactcctgggctcaagcaatcctcccatctcagcctcttgagtagctacagacatgcgccatcacatctggctaatttttaaattttttgtaaagatagggtcttgctaggttgctcaggctggtctttaactcctgggttcaagtgatcctcctgccttggcctctcacagtgctgggattacaggcgtgagctactatacctggtccagatgcttttagtcttaatcactgtaaatgttattttaaaattcttgttactgtgtgtgtctgtgtgtgttgtgtctgtgtgtctggtgtgtgtgtgtctgtatgtgcatgtctgtgtatgtctgtgtgtgtgtctgtgtgtgtgtgggtgtgtctgcatgtgagtgtgtgggtatctgttttgtatgtattgtgtgtgtatgtgtcttgtgtgttttgtctgtggtgtgtgtgtgtgtgcatgtctgtgttgtctgtatgtgcatgtctgggtgtgtgtgtattgtgtgtgtctggtgtgtgtgtgtgtgtgcgcgcgcatgtctgggtgtgttgtctgtgtctgtgtatatgttgtgggtatggatgtttgtgttgtgtttgtgttatgtgtgtgagtctgtggtgtgtgtgtctatgtgtgcgtgtctgtgtgttttatctgtgtgtgcgtgcctcggtgtgtctgtgtgtgtgtctatgtgagtggtgtgtatttggggatgtgggtgtgggtgtgtgtgtgtgtgtgcgcgcatgcagctcctctacctgctcctcccctttcctaaatatcttttaaatccacccagctagcatcatcctagttcaggcctgtttcccccttccctggactaggctcctgcctctgcctgctgcactgtgccctccagttctccccgctgtgatgggagcagccactgcacagtgccattctcatgccttagccttcaggcccttcagaggcttccgggaccttatgtgcagctccccagtctggcctctgctccccggtgtgtgctcttcccccaccccctccttagcctccagcctcacacccaggcctttcctgtgcggggccctccaggggagctcacctccccttcgtctggctgccacctcctcccttctggctccttgtccttccctgccttgctgccctgttattattggttttttgttgctgctgctgctgtttctgtctctctcctccatgaagatttaccttccatgagaacaggagctgggtttggctgccgcacccccgtatctctaggccctggcccacacagtgcctgcctggcacctgccagcagatagtcagtagaatgaagaatgagtgaatgaacaaatgaatggactcccataagaaggactaaattagataatacatacaaagcatctacagtgtgtctgggacatagttggccctcaatacttggttgattgcttcattgattcattcactcatcagtttattaagtgcctggctaatatccttggggatgcagcacctgacaaaacagataaaaacctctctgccctatgggccatgtcttccagtatagtataataagtgtggctgtggatgcatgtggggaagtgtgtggtttcctctctttcagccccctcttcctcagccttccaccgtcctcctcctcccaggaccctgtcccctctctccccacccaacctgggacaagggtcaccaagctgcagccactcctgccagcgacgccttggcaaaggagaggcccaggggccttgggtagactctagccactcctcaagctgctgaaagtggaatcacttcctctgccctggctggaataaataggccaggaataaaagtagaaaatcaaaagcccaaatcccagtgatgtgctaaaacgcaagtgctgccttaggccactgagctgcacgactccttacataacagaggactggagtttgcagaccagggcacctgcgatgtgtttgtagagccaggcctaggccttttcccagactccatgaggagcagcctcgggctccctctccgcaaagccaaagccattgctcctgcctccagggaggaagagactgaggccaagctatggccaagaaagctggccaccccagacccccgctcctccagagtagcccccctccaccggtggcacatgcctaccccttcaggtcagggctcaggattgtgaaggggaaggtcctcacctccagaatggtggaaccctgaggacagtgcctctcaaaagccagtccctagcattgcactctggggaatatcagcctgagccttgtctgcctcccaggcagggtccatgtctcagctaggatatttctcatcataccttaaccactgttggggtccctagcagggaactatcagccaaactgacattagccaaccaggacccattgtgttacttgctctctccatcggtaattcacattttctcaggagccatttgatagctgaaatattttaaagccccagagctttcatgccctgtgaccagttggcaggggtgggtgggctccccgcacaccacagcaccacctgcaaactctcaccacttttgcttgtgcatggaactgtgggattataaaatcatcttattttcattgcagaaatttccagaattgaaattcaaatatgtggaagaggagcagcccgaggagttttttatcccctatgtctggtctcttgtctacaactcagcagtcggcctgtactggaatccacaggacatccagctgttcaccatggattccgactgagggcaggatgctctcccacccggacccctccagccaagcagcccttcaagttcttttatttctgggtaacagaagtagacagacaggttacttggtgtatcttctgttaaagaggattgcacgagtgtgttttcctcacacactttgatttggagaattggtgctagttggcaatagataactcagcgtagatagtattgcaaaaaggggaggaaatacacaacaataataaatgtaaaaacctgctattcaacatgcagttttatttcgaagccaaaaatctagagctttcccaagatcctgttgccttaggcacatcacacttcaacagtgcacactatccaacagtgcacactattcaacagtgcacactattcaaaagcgtagactatttttttgcatgttcaagatatttgttttggtcttatgtgtgtgtgagagagagagattcctttgacattaaggagcatcaatgagaaaagatgatgaggcaggaattaataaagaaatgaagtcgtgtgtgtttggttgcctgtcagagggcacacaatttcataaacaccatgcctggacaatttgatattaatatttaacacctctgcatcttttcttaaaaaagaatatgggccagatacagtggctcacatttgtaatcccagcactttggggagccaagttagcagaatcccttgagcacaggaatctgaaaccagcttgggcaacatagtgagatcccatctctacaaaaaacttaaaaattagccaggcatgatggcacattcctgtagtcctagctactcaggaggctaaggtaggaggattgcctgagcccaggagttcaaggctgcagtgagctaagaacgtgccagtacactccagcctgagccacaaagtgagaccctgtctcgcaaaaaaaaaaaaagaaagaaaagaaaaagaaaatggctacttctcatgaagcccagattaacttttctgtgaatatggcctgtgaactgttgctggaattaaattggagtctagcacaaattaagttaatctactctgtattaatcattgggaaaaagaaaagcttcatttgaaaacagtctttttccttcacccacactaatagaaaaaggagagtaatttgttcatactgtattccacgtgggatgaaaagcatgttttgctctttgtttctgggccggtgtgatccgtgtgttggtgcctgagctggaggaaggagcttcttgcagggaaacagccactggggccacattgagggccagttgggaccttcctttccagtcacactctgtgtcctcacgggccccttcacagtctagataaggagcctagtttcattctcaaagaaaaagtatttggtcttcaacatagaaagcacaaaagcccagacgagactgagcacactgttcgaatccactgccagctcatctgtgtcagggctggcttctcctgtcctgtgtcccagggctgcaggcccgtgttatttgagtccatcaaatcttccgagggcctcggaggaaccattctcagtcaccccaagctctgtaaaaggtcaaaacactggcagcctctcagtgcaccactgtgtgggctccacacgggaaggcctggccaagctgtgctcttagaggctgtcgaggtagggcaggaagcttccctatcctcgtctggatggaatgaaacagaggttccctaaggccaagggactcgtggagcgcccatcccgggtggggtcccagaggtgagtgcagcttgcctcctgtccccaaggggcttgttctgtcaggcctcctccagtcactgctggagtggggactctgactcctgtgttcacctcagagcccatgtacaggctagaggtgaggcttggcaacaacttctactaatacttagctttgtggcagagccagtctgaaggaggagaagcgctctcagccagcagggggagtgatgattatcatttcaggtagcaaggatatgtatttactatgtggggaaataatttgcaactttaatttgtttccaaagcattttgattggcttccttttcctttaaaccaaaaaattgtttaaatgtttaagggtcatgtggaacagctgagcttctggcaggaccacagaactgtcctctgagtctgagggctgggcagtgccacaggacagtccctgggctgcaggactgtcagtgcttgttgtgtgaggaaatgaggcccttcaaaaacccagtcatcttgacagagggcacactcccaaggaaggcctgactggggaatcatacagcctctcctccaggcctctgggctcactgaggtgcccccagaaccctgattgccctcccctctttcccttttctcattcatcacacagtagaagcactcactagctaacagctcagctggggcagcagcctccatggaggcctgcaagtgatgctcccagtcctggttcccgctcaggagggaggccccaccacgtgcatcactgcctcagctctgcaaagtcaccagaggcttcttcctgatttttgtgaaagatttattatatggcaataaatctgaatgataaactttcattatacttgcattaattttgagtattagtttgcttagaaatttttacacgaagtaaaaatgtgtaatgatgcaacacaggatcatcgtgtgttcagatggaaattggcatctgattttaccccagatctgaagctgttactgcattgtgtcattttatcaacaaagacttctgccacaatatttacttttaaaagaatttgtccctttcaatagcatcttccctatcaagagttcaaggcactttgcagaagagcttcagatttctaactctagttcccacagtcacccgttgaggctggtgtcatacaatctatgaacaacaaccttgcagcaggactgccaccattcagcagtgcagacagcacagctcaaggacaaagacagagaaaggaaagaagagaaggtccctgaaggtgaagcatagaaagtacactgcacacacagttctctctggaaggaaagcacaggagctgggaagtagacgatagaaagtggaaaggacacaggaccagcatcagaacactcagcaacttcctaagagcttgctaaggtacatccaagagaaatatttagtgagggaaacttttaagcactggaattgttaatatatcatactttaagcaacatttcgtcctttagattccgggagccagggttttgcattgggtggtagagctctctgcataattgagtcaccctgtgcttttttgcagagccataaatttttggcacttgctgatacttcataggctggagtctctgcaaggtcaaccctttgggtctcttaattctttcctaggcactatcctgcaatatcagtagttgccacttgattttagggactgattattaggccttctgactccaaattcagaacaattccagtgtcctacatcacctcctggagtcaaagaggtcagtttctattcagtgatgaagagctaagctagctatgcatatgaagaactgagaagtagattataacacacaatccacagcaaataatgcatatttattttgtatgaattaaagcataaaatttaatctcattagcgtatagctattcagagttcccactcaaagcaagggagactcaccagtagccccaagacccttggccaggtcatactcaacccctaatctaacttcacaaggctgtctaaatgtcagctactcagacacagcctctggcattagcaaaatcccccagaggaaaagcagccccatagaactggacaagtaatacttaactatcttgttgactctggggtccttcaagcaaattttaaaaatatttttaccagatttccaagttgtccttagcttgagggttggtcctccattactgtcattggactatccctcatgggtagtgcagttcaacttctaaaccacctcagtacctgaatgtggtccgaggtgaaaccagattactgatgccttcaggtgcccaattgaagcaaatggcaaattctgtggaggaagtaaacataacccaaggcctcaaattatttctgcagtgttgcaatcagaaatacccaggtatgggagaagaccagacaacattaattacttgaattaaaaccattagaggaaaacacagacaatagaaatatccaaacagactccagataaagttgtcgcagaatttaaaacagctatggttactgtgttcaaaaaaatgagacgcatggtcaagaatttcaacagagagttagaaactgtaaaaggcgcattggaaattctataactaaagtactgtaatgagaagaacagtgaacaggtttaagagcagattagaaataactgaaaagagaatgagtaagatgaaaaattgagggtgaggggtgggagcaggaattatatagtaaaaaaaacagaacatggagaatagagggtaagagacttaaagggtacagtgagcatgtctgacctgctcagacatgcagggtagttggcatctcaaaagagtagaagaaaggaatatttaaacaaatggctgagaacttttccaaaactcatgaaagatatcacaccaaaaattcaagaatccctcccacaaactccaagtgggataaataaaaacaacccacacctagaaacatcatagtaaaactgttgaagaccaaagaaaaataatattttagacctgctggggtgggagagggaatataaccattaaaggagcaataatattagactgacagctccttctcagcagaaacaatggaagacagtgaaatactgccttttatggttctgaaagaaaatgactgccaacctaaaaatttctaatcagggaaaatatcctgcaaaaatgaagaggatatgaagacatttttagagaaacagctagaagaattaatcagcacgcctaccctaaaggaaaatttaaaaggtgttttacaggcagaaggaaaataatcccaaacgtaaggacagagccctaggaaagattgaagagcaatgaaaatgacacataaatattgactacataaaacaataattatgtcttatggagttttaaatatatagagaaataaaatgtatgaaaatgaaaggatttatgtgggaattttaagtgttctaagacacttggcatcatccaagaagagagtaaaaattcatttaatattagtctttgataactcatgtatgcatgataatatttgagatatcaataaaagtgtatagctttccacataataagagagaattcgaataatcaattcagtggaagatttaagaattgcaaaagagtctaagaaagaagaaaaagcagaacaggtggaacaaatagaaagcaagatatttgtgataaatccattattacactaaatgtaaatggactaatgctcaaatgttgacaaatattgtcagccttgttttaaaccatatgctatttacaagagacatttttagaacatgaatttagaaattttggaagaaaaagatggagaaatacatacccagcaaacagtaaccatgaggaaactggtgtagatatatttaagtaaactttaaggcaataatttttttaagaaataaaagggtcaattcaattactagaaagataatctaaatttatatgcacttaaaatataaactcaaaatatgtaaaagaaaatttgataggaaatttagacaaatatgcaaccagagtgatattttaacatgcctattttgttaattggtagaaaaactagcatacaaaaatcaagttataaaagatttaagcaatgaaatgagcaaaccaaacggatgtatgtaggacaccaaactcgataacatacttttcaaacacaaatggcacacactccaaaatactgggctataaaggtttcaacaggctaggcacagtggctcacatctgtaatactagcactttgagaggccaagtcaggaagatcacttgagcccaggagtttgagaccagcttgggcaacataatgaggccccacctttacaaaaaataaaaaaattaactgggcatggtggcatgtgcctatagccccagctacttgggaaggtgaggcaggagaatcacttgtgcccaggaggtcgaggctgcagtgagctataattgcactactgcactccagcttgggtgacagagcaagaccctgtctcagaaaaaaagtctcaacaaacctgaaaatacttcaaatgaaatatgttctctgaccataatagaatcaagactaattatttacaaaaagataattttataatcctcatatttttggaaatagatttccaggtaacccatctgtcagaatcttaatggaaatttgaaatattttgaactgatcatgaaaatactacatatcaaaacagagaaaaaacttgtgggatgcaaataaaactatgcttagaagaccttttaattttattttaaatttaaagagtacctgttcaggtttgttacaagaatatattgatgatgctgaggtttgggctcctaatgatcctgtcacccagatagtgaacatagtacccaatagaaagtttttcagcacttgcttccctctctccttcccttcctccctcgttttggagtccctagtgtctattgttcatatatatatatacacacacatatatatttaaatgtttatgttagaaaagaagaaaggttaaaaatcaattaagcaattacctcaaaaattttaaaaacagcacatgaaacccaaaaataagccaaattactgatatagaacacaaatatacaataaagggaatcaaagtcaaaagttggttatttaaaaggattaagaggactcattggctgggcatgttggctcacatgtgtaatcccagcactttgggagtcacctgaggtcaggagttcaagaccagcctggccaacatgatgaaaccccgtctctactaaaaatacaaaaattagctgggcgtggtggtgggcatctgtagtcccagctacgcaggaggctgaggcaagagaattgcttgaacctgggaggtggagggttcagtgggcagagattgtgccactgcactccagcctgggcaacagagcgagactccgtcccaaaataaataaataaaagaattcataaccccttaaaagactgatcaaagaaggaaggagaaagggcaggagagaggaatagccaatatcagaaaggaaaacaggtaagttacttcagattatgcagacatttaaaatatttaagagccagcctggataacatggtgaaaccctcctgtctctacacacacacacacacaaattagctgagcatggtggtgtgtgcctgtagtcccagctactggagaggctaaggtaggaggattacctgagcccaggaggtagaggctgcagtgagctgtggtcatggcaccacactccagcctgggcaatggagtgagagaccgtgtctcaaaaatatgtatacatatttaagagaatattatgaataccaataaattttaaatctagttgaaatgatctttattgcagtgataggtgtatacatatgtctaatcaaattgtacactttattacatatgtgcagttttatatattaagtatgcctcattaaagttgtttttagattttgcataaaatgaacaaattctttaaaaaaaaaaaaaaactctccaaaactgacatgaaacgatcctgaacattggaatcatcctatatctagcgcatacattgagtccataattacaatctgccacaggaaatttacagaccaagatggcttcagtagtgaatttaaccaaacatttaagagtgaaataatgccagttttagacagtctcccagaaaatagaaaaaccttctaatttgttttatgaaaacagcttaaccttagatataaagaatttgccaagaacaatacaagaaaggaaaattataggccagtcctcatggtatagatgcaaacagaaactagcaatctacaaaaacaatgtgtaaaaatacatcatgatcaaattggatttgtcattcacaaatcaattagagttattcaaagaatacagaaggaaaagtaaatgatctcaataaatgcaggggaaaatgtgataaaattcagcagtcaagtgctagaaatgtttagcgaactaggaaaaacggaagctatcttaatcttataaatattattttaaaactacagcaaacgcatcatacttaaaatatcaaaagctttcattctgagatcagaagcaaaaaaaaggatgtctattatcacttctattcaaaatgtcgctaggtgatgctatgcatgcctaagtatttagtggggagtgtactggtaccttaaattactttgaaatgcatcatgaaaagggaaaaaaggatggcttgatggatagatatatatgtgataaagcagatatagtaaacttggtaaaatctagaatggtagaatccagatggtgggtatacaaatgtacactgtacaatattcaattttgctatacgttgaggaaactatcacctgagttcctggcctagtatggcaagatttccttttaaattaattgggtagggtcagaagaaaatgaactatcattatttgtaaatgacatgattgaggatatagataatttaaagaattagccaataaactagtaaaattaacaaggcttctggacacaaggtcacagacaaaaataacgtgtatttctgatgctagcaataaacaattagacaatgaaattgcaaaggatatgaacagatacttctcaaaagaagacatttatgcagccaaagacacatgaaaaaatgctcatcatcactggccatcagagaaatgcaaatcaaaaccacaatgagataccatctcataccagttagaatggcgatcattaaaaagtcaggaaacaacaggtgctggagagggtgtggagaaataggaacacttttacactgttggtgggactgtaaactagttcaaccattgtggaagacagtgtggtgattcctcaaggatctagaactagaaataccatttgacccagccatcccattactgggtatatacccaaaggattataaatcatgctactataaagacacatgaacatgtatgtttattgtggcactattcacaatagcaaagacttggaaccaacccaaatgtccatcaatgatagactggattaagaaaatgtggcacatatacaccatggaatactatgcagccataaaaaaggatgagttcatgtcctttgtagggacatggatgaagctagaaaccatcattctgagcaaactatcccaaggacagaaaaccaaacaccacatgttctcactcataggtgggaattgaacaatgagaacacttggtcacagggtcaggaacatcacacactggggcctgtcgtggggtggggggaggggggagggatagcattaggagatatacctaatgtaaatgatgagttaacgggtgcagcacaccaacatgtcacatgtatacatatgtaacaaatctgcacgttgtgcacatgtaccctagaacttaaagtataataaaaaaataaataataaaacaaatactcagagatcaatctaaaataaagtgtgattgaaactaaagatctaaataagggttccctaaataagggaccactccagggtcattagattcataagttggaaggctcgatatctcagaattgatctacggattcaatgcaatctcaatccaaatcccagtattttgggggaatgggaaaacttgacaaattggttttgcctaaaatctacatggaaatgcaaaacgcctagaattgcacagaaaaccttgaaaaagaataaagcccatacttacattgctagatgtctacaacttacagatgtactctaattaaaacctataggccaggtgcagtggctcacacctataatcccagcacttgagaggctgaggtgggaggattgcttgagaccagcctgggcaacatggtgaaactctgtctctacagaaaattttaaaaattagccaagtgtggtggtgcacacctgtagtcccagcagctggagaggctgaggcagaaggattgcttgagcccagaggcagaggtttcagtgagctgagactgcaccactggactccaacctaggtgacagagcgaaatcctatctcaaaacgaaaacaaagacttacaaatttactctaagtttagtattgttataagggtagacaaaacatattgatgaaatagaacttaaaggtccacatatataaggacaattgatttgacaaaagggacactgctgggtaatggggaaatgatttttttccccaataaatggcgttggcacagtgaagggaaaatgaatcttgacccctacttcactctgtctgcaaaatcagttcccaggggactatagagctaaatgtgaaatgttaaaccataatattctagaagaaagcataggagactat

SEQ ID NO: 115 - DNA, 3363 bp, Homo sapiens
gtgccacgtgaccacctggctggcgcgcgcgcctgggggtctggtccctagccgcgttctcggtcgcttccctcttctctcgccgcctcctggcctccgcaccgacgcggcccgggctggagccgagccggggccgagctgcaggccggaccggagccggatctgtacccgctgagacgtggaaacatggaggcctgagccggtgtgcgccacctgggctgcggcggcgacagcgacttctcctgacccctctgccaccctcccatccgtccgcgggtccgtggagctggagcagatcccccagccggctgagacaggttgtcttttggaaatgcaggtttaaggacaaattatctgcttaagctagaagatgggatcgaatagcagcagaatcggcgatcttcctaaaaatgagtacttgaaaaagttatcaggcacggaatctatctctgagaatgacccgttctggaatcagcttctctcattttctttccctgcaccaactagcagtgagttgaaactcttggaggaagcaaccatttcagtctgcaggtcattagttgaaaacaatcctcgaacaggaaatcttggtgcactaattaaggtcttcctttctagaaccaaagaactaaaactttcagcagaatgtcagaaccacatcttcatttggcagacacacaatgctttgtttattatttgctgtttgctgaaagtgttcatctgtcagatgtcagaggaggaattacaacttcattttacttatgaagaaaaatctcctggcaattacagttctgactcagaagatcttttggaagaattgctgtgctgtttgatgcagttgatcactgatattccactcttagatattacatatgaaatatcagtagaagctatatcaacaatggttgttttcctttcctgccaactcttccacaaagaagttttgcgacagagcatcagccacaagtatttgatgcgaggtccatgtcttccatacaccagcaaacttgtgaagaccttattatataactttatcagacaagaaaagccacctcctccaggggcccatgttttccctcagcagtcggatgggggaggactgctttatggacttgcatcaggagtagcaacaggactctggactgtcttcacactaggtggtgtgggcagcaaagcggctgcctctccagagctttcttcccctctggccaaccagagtctcctgcttctgctggtgttggccaatctgacagatgcctcagatgcgccaaacccctacagacaagccattatgtccttcaagaacacacaagatagcagtcctttcccctcatcaattccacatgccttccagatcaactttaatagtttgtacacagctctttgtgaacagcagacatctgatcaagcaactctcctcttgtataccttgctccatcaaaatagtaatattagaacatacatgttggctcgcacagatatggaaaatcttgttttaccaattcttgagattctgtatcatgttgaagaaaggaattcacaccatgtgtatatggcccttataatattgttgatccttacggaagatgatggcttcaacagatccattcatgaagtgatactaaaaaatattacttggtattcagaacgagttttaactgaaatctccttggggagtctcctgatcctggtggtaataagaaccattcaatacaacatgactaggacacgagacaagtaccttcacacaaattgtttggcagctttagcaaatatgtcggcacagtttcgttctctccatcagtatgctgcccagaggatcatcagtttattttctttgctgtctaaaaaacacaacaaagttctggaacaagccacacagtccttgagaggttcgctgagttctaatgatgttcctctaccagattatgcacaagacctaaatgtcattgaagaagtgattcgaatgatgttagagatcatcaactcctgcctgacaaattcccttcaccacaacccaaacttggtatacgccctgctttacaaacgcgatctctttgaacaatttcgaactcatccttcatttcaggatataatgcaaaatattgatctggtgagtgtaaatgaagacatttattatgattcttttttaagtattaaagcagagaatgtttaataagccttggtaagaactataatagtaagagtttcttctttcaacattaactgtatttgcagtctattttactataatagttgtggtaatctgtgtgtgtgttgtatatacacacacatacatatttaatacaattgaagtcatacttcatacagttttttattctgacttttttactttacacttagaccatgagcatttttctgtggtattatcaattctttgaaagtctcacattttaatttctatctagcccatgtttgtgtcctaaaatatatataactattatcccatttttgctcatttatttccagtattttatatcaattcataatgaatgaaaagtttataaataagtcttatctcaaattttaaaattatatttttgatatggttttaaagctggaattttactagtttttactgtcaaaagatatctttattttcaagattcaacacaggttgccaaattgctttccagaaaaactgtagaatttatgcctgtgggccgggtgtggtggctgatgcctataatcccagctacttgagaggctgaggcaggagaatcgcttgaacccaggaaatagaggttgcagtgagccgagatcacaccattgtactctggcctgagcaacgagagtaaaactccgtctcacacacaaaaaaaaaaaaaaaaaaaaaaaagtgatctccttctttagctcaaggttgctgcaagctggagctgagctgtcagtggaacgggtcctggaaatcattaagcaaggcgtcgttgcgctgcccaaagacagactgaagaaatttccagaattgaaattcaaatatgtggaagaggagcagcccgaggagttttttatcccctatgtctggtctcttgtctacaactcagcagtcggcctgtactggaatccacaggacatccagctgttcaccatggattccgactgagggcaggatgctctcccacccggacccctccagccaagcagcccttcaagttcttttatttctgggtaacagaagtagacagacaggttacttggtgtatcttctgttaaagaggattgcacgagtgtgttttcctcacacactttgatttggagaattggtgctagttggcaatagataactcagcgtagatagtattgcaaaaaggggaggaaatacacaacaataataaatgtaaa

SEQ ID NO: 116 - protein, 593 aa, Homo sapiens
MGSNSSRIGDLPKNEYLKKLSGTESISENDPFWNQLLSFSFPAPTSSELKLLEEATISVCRSLVENNPRTGNLGALIKVFLSRTKELKLSAECQNHIFIWQTHNALFIICCLLKVFICQMSEEELQLHFTYEEKSPGNYSSDSEDLLEELLCCLMQLITDIPLLDITYEISVEAISTMVVFLSCQLFHKEVLRQSISHKYLMRGPCLPYTSKLVKTLLYNFIRQEKPPPPGAHVFPQQSDGGGLLYGLASGVATGLWTVFTLGGVGSKAADELSSPLANQSLLLLLVLANLTDASDAPNPYRQAIMSFKNTQDSSPFPSSIPHAFQINFNSLYTALCEQQTSDQATLLLYTLLHQNSNIRTYMLARTDMENLVLPIILYHVEERNSHHVYMALIILLILTEDDGFNRSIHEVILKNITWYSVLTEISLGSLLILVVIRTIQYNMTRTRDKYLHTNCLAANMSAQFRSLHQYAAQRIISLFSLLSKKHNKVLEQATQSLRGSLSSNDVPLPDYAQDLNVIEEVIRMMLEIINSCLTNSLHHNPNLVYALLYKRDLFEQFRTHPSFQDIMQNIDLVSVNEDIYYDSFLSIKAENV

SEQ ID NO: 117 - DNA, 2896 bp, Homo sapiens
gcgcgccgcgtgccacgtgaccacctggctggcgcgcgcgcctgggggtctggtccctagccgcgttctcggtcgcttccctcttctctcgccgcctcctggcctccgcaccgacgcggcccgggctggagccgagccggggccgagctgcaggccggaccggagccggatctgtacccgctgagacgtggaaacatggaggcctgagccggtgtgcgccacctgggctgcggcggcgacagcgacttctcctgacccctctgccaccctcccatccgtccgcgggtccgtggagctggagcagatcccccagccggctgagacaggttgtcttttggaaatgcaggtttaaggacaaattatctgcttaagctagaagatgggatcgaatagcagcagaatcggcgatcttcctaaaaatgagtacttgaaaaagttatcaggcacggaatctatctctgagaatgacccgttctggaatcagcttctctcattttctttccctgcaccaactagcagtagtgagttgaaactcttggaggaagcaaccatttcagtctgcaggtcattagttgaaaacaatcctcgaacaggaaatcttggtgcactaattaaggtcttcctttctagaaccaaagaactaaaactttcagcagaatgtcagaaccacatcttcatttggcagacacacaatgctttgtttattatttgctgtttgctgaaagtgttcatctgtcagatgtcagaggaggaattacaacttcattttacttatgaagaaaaatctcctggcaattacagttctgactcagaagatcttttggaagaattgctgtgctgtttgatgcagttgatcactgatattccactcttagatattacatatgaaatatcagtagaagctatatcaacaatggttgttttcctttcctgccaactcttccacaaagaagttttgcgacagagcatcagccacaagtatttgatgcgaggtccatgtcttccatacaccagcaaacttgtgaagaccttattatataactttatcagacaagaaaagccacctcctccaggggcccatgttttccctcagcagtcggatgggggaggactgctttatggacttgcatcaggagtagcaagactctggactgtcttcacactaggtggtgtgggcagcaaagcggctgcctctccagagctttcttcccctctggccaaccagagtctcctgcttctgctggtgttggccaatctgacagatgcctcagatgcgccaaacccctacagacaagccattatgtccttcaagaacacacaagatagcagtcctttcccctcatcaattccacatgccttccagatcaactttaatagtttgtacacagctctttgtgaacagcagacatctgatcaagcaactctcctcttgtataccttgctccatcaaaatagtaatattagaacatacatgttggctcgcacagatatggaaaatcttgttttaccaattcttgagattctgtatcatgttgaagaaaggaattcacaccatgtgtatatggcccttataatattgttgatccttacggaagatgatggcttcaacagatccattcatgaagtgatactaaaaaatattacttggtattcagaacgagttttaactgaaatctccttggggagtctcctgatcctggtggtaataagaaccattcaatacaacatgactaggacacgagacaagtaccttcacacaaattgtttggcagctttagcaaatatgtcggcacagtttcgttctctccatcagtatgctgcccagaggatcatcagtttattttctttgctgtctaaaaaacacaacaaagttctggaacaagccacacagtccttgagaggttcgctgagttctaatgatgttcctctaccagattatgcacaagacctaaatgtcattgaagaagtgattcgaatgatgttagagatcatcaactcctgcctgacaaattcccttcaccacaacccaaacttggtatacgccctgctttacaaacgcgatctctttgaacaatttcgaactcatccttcatttcaggatataatgcaaaatattgatctggtgatctccttctttagctcaaggttgctgcaagctggagctgagctgtcagtggaacgggtcctggaaatcattaagcaaggcgtcgttgcgctgcccaaagacagactgaagaaatttccagaattgaaattcaaatatgtggaagaggagcagcccgaggagttttttatcccctatgtctggtctcttgtctacaactcagcagtcggcctgtactggaatccacaggacatccagctgttcaccatggattccgactgagggcaggatgctctcccacccggacccctccagccaagcagcccttcaagttcttttatttctgggtaacagaagtagacagacaggttacttggtgtatcttctgttaaagaggattgcacgagtgtgttttcctcacacactttgatttggagaattggtgctagttggcaatagataactcagcgtagatagtattgcaaaaaggggaggaaatacacaacaataataaatgtaaaaacctgctattcaacatgcagttttatttcgaagccaaaaatctagagctttcccaagatcctgttgccttaggcacatcacacttcaacagtgcacactatccaacagtgcacactattcaacagtgcacactattcaaaagcgtagactatttttttgcatgttcaagatatttgttttggtcttatgtgtgtgtgagagagagagattcctttgacattaaggagcatcaatgagaaaagatgatgaggcaggaattaataaagaaat

SEQ ID NO: 118 - protein, 656 aa, Homo sapiens
MGSNSSRIGDLPKNEYLKKLSGTESISENDPFWNQLLSFSFPAPTSSSELKLLEEATISVCRSLVENNPRTGNLGALIKVFLSRTKELKLSAECQNHIFIWQTHNALFIICCLLKVFICQMSEEELQLHFTYEEKSPGNYSSDSEDLLEELLCCLMQLITDIPLLDITYEISVEAISTMVVFLSCQLFHKEVLRQSISHKYLMRGPCLPYTSKLVKTLLYNFIRQEKPPPPGAHVFPQQSDGGGLLYGLASGVARLWTVFTLGGVGSKAADELSSPLANQSLLLLLVLANLTDASDAPNPYRQAIMSFKNTQDSSPFPSSIPHAFQINFNSLYTALCEQQTSDQATLLLYTLLHQNSNIRTYMLARTDMENLVLPIILYHVEERNSHHVYMALIILLILTEDDGFNRSIHEVILKNITWYSVLTEISLGSLLILVVIRTIQYNMTRTRDKYLHTNCLAANMSAQFRSLHQYAAQRIISLFSLLSKKHNKVLEQATQSLRGSLSSNDVPLPDYAQDLNVIEEVIRMMLEIINSCLTNSLHHNPNLVYALLYKRDLFEQFRTHPSFQDIMQNIDLVISFFSSRLLQAGAELSVERVLEIIKQGVVPKDRLKKFPELKFKYVEEEQPEEFFIPYVWSLVYNSAVGWNPQDIQLFTMDSD

SEQ ID NO: 119 - DNA, 228006 bp, Mus musculus
  misc_feature (1)...(228006): n = A,T,C or G
acattctgtcccaggacagaacttaagcagactgccttctatggtggctttcttctatggtgccagcccagtgcctccaagtgacagctcctccagccaccctgtaaaggaaaatagctgcccactctcttctcagagcagtgagctctctgcatatttctgtatagactgtcaagtgggcgtcacttccaacttgctctagatttatttccaagttcttaggggcacacgcatttttgtgctcataggcgacctctttttactctctcgctggacactgtcatacttggacatctggaggtccaggcatgcaacatgtgggtgaggggagccgtgtgcctgatgactgtggccaatggggaggtaacaatggggtcccaggcctatgcaagctgtaggttgactgtggtctaactagaccgatatgccttcccatcagctgactgttaaagtatgaaaaggtgggccagagttgactgaccttctgaaaagtcgaaatgtggatacttgcacgagatcttttgatttatagatattcactcaaatattttttaagccctcagtcagataaaacacatcatagtccaagggtggctaagagctgcaggtgtctctgttttgtggctgtgctggtgtgcaggatgaatttgtcatctgaggggtggtgtgtgtagtggtttaagtgaaaatgtcccctgtagcctcccgcatatgaaaccttggtccccggttggaagagctgtttgggaaggctgaggaagtgtggccttgttggcagaagtatggcattggaggaggggaaagagagggggggagggggagnnnnnnnnnnnnnnnnnnnngagagggagagagagagagagagagagagagagagagccctcacaatttcttgtttgtttactttgagtcctgcttcagttcaccatgtgagctctcgtctccatcctacagctgccatgcttgacaagtgcccatcatagtgatgacttctttcccctctggaagagtaagccctaagaagggcttccttctagaagttgctttggtcaaggtgttttatcacaatgatagaagaaaaaaacaaaacaaaacaaaacaaaacaaaaaaactatgtacctgtgcagaggccagtgggccctgtgaaccactgaagagctgttttgagagccactgtgagccgagggtccaggtgacaagaggacagcttgaggagagagaaatgggtactgttcttggcttgacaccgtcagtgtcttctcttgatactgaagaccagcggaccctcctgtgtggtatagccccactgagacccaggggcctgaaccactgatcctactgggctgttgttcaggaagatgttgcagagacaaagagaactagctgggggactgtggttaccccaggagggacactggagagtaagtgttacctgaggagggcctgggtgatggggccactgcatttagagttttcaggcctaacctgaagtgtccttctgggttcacagcaggacacatttggtctcccttccccttcctaacacgctctcaggtagttctttttcttagtgtgtaaatccagaggcaccagtgggaggcgggggtagcggcagccatctacctggagtgcagggaagaaagagactgggtcctcttgagtctgtgcagcatggcagaactgagggtaccccagatttgtaacctgggagaggatcagacttaaggctcagtcaaggcatggggaatctaagatggtgcgaccttaaagatcgcgctccctggcagcagtagtcaaggagagcttcatggagggtgcggtattcctggaaacattccctaaacccaagggtgtgtagttcaaagaggcagaggcaaagaggcagaggcaagagagagtgcaaaagcagagtgagggagaacagaggtggcctcgaggtccagcagtaaatgagggcttgctgggtacctgggtggggtgagcccctctctcatgcatcattgtgcctcgtccttgcagttcattatgaggcatatgttcatcagcgtggtttacagacaagcaggcaggcgagggatagtccagagttatgtatgcagtaggcattgagctaaccagtggtacaatcagatcccataccctttatattcttccatctcaagagcagaggcagtgatgaaaccacctggctccaacaagagtgtgtggttcacttggctggctggtgaccctgcacagctttggtcagttgtacctgacctccatgtcccccggcacctgtagggtacagtgctcaacaagagtccaggactccttagttgtaatagatagtcttgaggaggctctgggacattataggaagatgtcaagccatggattgggaggaagatagtggacaagaggatccctgcgtcctgtgtttgacattcgagaagctggaggggactggagagaacaggatctcagtggccactggcaggagaactaaggaagctggtcctgaagcccacgctagggtgtgtgggaggcctgaacttggggtggagacaggtataagatacggcagcacctcaaagatcttgctgtcttgtcaaggctagataaagacccataaatattttaagaacagcccagggctgagtaacaggatcggggaggataataaggtgtcagaggcattgtgcttcgagccaagggaggtggtcaatatcagatgcaagtggaggcccctgtggtccttgagaatttgaagggaaggcagacctgtatgtacagtagggatatcccagaaataatgcagggactggacctacagagcctgcctgaatgcagtcccctgcctcaggtgtcctggacccagctgctgctctgacatttctctcttgagaaacacagctggaggcctgggctggaaggaggatgtcatgacagatcacctagcccctctctcagcttctctctatctagaccttccaggactgatggcagctgcacagaccagctaccctcagaggccacagcgcaagtcctgccttctgctgcctgtgtctgtacaccttctcatgggtgcctgctcccagtcaccctgaccttgctctcaggatggagcagtgagcaaaaggggctctgtccagagttgactcacatagtagggctacatacaggatgacttagtctcctatagagtgttccccaccctctcatgcccactctgtgctaatgatggtaacccagatctacacttggagggtcacaaaggctggccgtcaccaggagacggggagctgattcggatgggtgaattgtgtctaggctgactatagcaagaggcatctgtgcatcctccggcaagtgtttttacctgcaggttttgatcccttcatctgcacagggtgccctgtgaggctgtattctcgtagtgccactagagccttgcatcccagattttaggaacaagcacagtgtggaggtagtacccaggaccacctccctccccaggagatagttccctcagcccactgaggtcctactctgtgcaaactctccctgcacaccgcatggatggtaagaggagagctcacatcttatgactacctagccaaaaggtcaggatggagcctccagctattccactatgccagggggtggggcgggatatctgaataggtgggagtgataagtcagcttctctgatcttgggtagcctaaagatagttagtcctctgccaccaccagcagcctgagagctggctagaaacatagactcccaaaatccatgttggtacatgcccataatcccaacatttgggagacagaggcaagatgatcaggaattcaagaccaacctggggtatgtagtgagtctgttttaaggaaaaacagcctcagaatttgctctctagctccaagctactgagtcgggacttattgtaacatgatgatggggactctgtgcccattgagttttggggagcacccagtctgtctgctaggcttctcttctcttttggtcctgcccactcccagaaatgcatcatgatggacaagtgcaacaaaagttctagaagcacagggtatatgaaggtgcctcacattctttaatcctgtgatcatggcaccaggcgtttgttttataacagaccagcattctgaataacaccctacccaatgttagggtaacaaagggttaaagtggggttggtaaagcaggggagtcctcattcagaggatgatagatgtcctacctcctgctgcagtaaatgtctctggttttgaagtcctacctccactactgtgtttctgaactttcccacttctcaggggttggagaacctgagatttctgttcacacaggccaccactgaaccgtcctatgtgcctctggcacacatgaatatattgagtcattgggccagcgccaactatagcaaccagacaatagggatcaagaattgattgcctgggaaatcgtattttctacagagtcatctgtgaggggttagagaacagacctgatgagatggcctgacagagaaaaggttcccatggctgcctctggacagctatgggcatcttccctcccagacagcccatgtctctcttcccgcaggctttatatatatcacactggcctatgtctgcctggcaagtcacgaagaactgtcatcccagctgtattctgggtgaagctattctagctggctctgtgtggtaggggatctcgggaactagcatgtgatggcaacagccagcacgtttgtaacatggtcaccaggaacaaactgcgagtagggaacccaagggtatggtgctctgagtaaccaggccttctaggaagtggtgcaggcaaagttgggatgaagtctttggtagatatgatgattgttattaacaaaaatggctcagtgaacccatgttggatcccctgccttcaaagctcagacattaccctgaggcagagttcacatccttttgtgatcaagcacagactggagagcaccaacttctgagccttggagcatcaagcaacccctcccccttcacttctagggtcccttacagcttccgtggcttcccttacagcttgcctggcttcccttgcagctactctggcttcccttgcagcttgcctgggatcccaaagggagctaagtcctttgttgctgctcaagccaaaactgagccaagaaagtagactttgagatctttgtatcttcttgtgtgaggtccagcaactctgctgggtgggttagatgctgaaggggttagggaatgagcttgaggaagttaggggcctaaaaatggatggattccccaggaatggcaggtttcccagcagtcaaacctctcctgacctgcaggtcacctagcttattcctgagcagggaggggagggggaatgcctctaatgcctgtctgttcttaaaaggattggctaaatttacagcacctaatgccttttgattctgagcaggttgagggtggaaggataatgaagggtggagactatcttattgtttctaggcctacagggtgccctgtgatgtgagtgttaactttgtctctgggccaatagaccaagggagggtactgtgagcctctgggttcagagccaggtaggaccagagggagaaggaaagataggttcctcagcagaaacccctatgctttgtgctggctttttatggaagctgcagacaacactggggggaaaaaaaagaggttgggttgtaagggtctgaaggaggggaatgcagtgtagggagggtatctttacattagagggtgggtattttaaatttctaatcttaagcagtcaggtagtgaggggctgtagctgcagcatgtgtatggcccagctggaatgtgatcacagcacacagccagggatgtctcttcttcgagacagacataggtgtgcccgtcattctctctgggaattgcaagggtccctaacccctacttcgtgctatgtctgcttcagctccatccttgcctgcagccttagggtaaccccctcccttttgctgcctttacagcaaaatgcagctttagggctttttctcctactggcttttgggtcctcctcatccgtcacctggcagggaataggggcaggacaaggtcccagggactcactgcagagaccagctcctgggaggggcatctcttcatgttctgtgcctgagtgactgagttgggggtccttggttctcttctacgctctcttctctccttttccttcttgcatggtcccaaccttcttgttcactttgactttctgtgaagaccagaaccctcctcctctgtggctcctagctcagcctgctacccagctacataaggtgctcccatcactcctcactgtgacttagaagctgaattaggagcgaaagcagtggaaagatgcactcactgtggtgggagcgcccttctggccttgtagatgtggggggggggggacctgcaggtctgtgtcccaaaggattgagtaaacatagttgcacacccacgttcatagcagattctccacagccagatgtgagaacggcccacatgccagttaatggagtagtagatggtcagagtaaatacacatgatagattactgtaattcagtatctcaccagccataagagaaccttgagtgcattgtgaaataaagcaattatagaagtgttgtatgactccacataaacaaagtaccaagaataaataagtcatagagccagaaggaaggtaaggttaaccagggcccgtgcctgggcctgggcctgagcctaagcctggggaatgaaatattcgtgtgcagtggatgaagggcttcagtttgggataatgaaaagtttcagaaatggaaatgggtagtagtcatagttatagaacattgtggccatacttaaagctattgagttgtatatttgaaaaaatgtccatgtataatttaaacacagtggacaagtagctgatggacacggtataggagattgcagcgtgagagcagggagaaagacctgcctggcatctgcttgggatcttgttgcttttgggggtgagtttcccaggagtgacttcatagaagacaaggatggtatctctgtaaactatgttcctgaggagagaggatatgacaggatacaagagaggcctactgtaggtctgctcactactgtaaacaactggggcccaatctgcttaaggcctactgaatgatcacaaagctgccaccttgggattgtcatcaaaggccaaaaggtagagctatgttcctatataagatgtccctgtgaggtgctggacccttccacttccaggtcacaggactcaggtgggtcctgtaggttatctacagtctgaacagccctaagcaggtggcacctgatgccaggtgctgtcagctgtgcctggaacagattggacaacagcaactgggttagtaggggccaaaaggagcacatggataaataggtgtgcaagaatgaatgaatgaatgagtgaaaatgaataaataggtacccatggaatagtccttttttctcccctttgaaaactaaaatattgcaggatccaactgaatcacaattctttgccttacctcagtgagccaggtgggatcgttgccatgtctggtttcctcacaggacatgtgttcatgacactcatgtgcctagaggggcccacaagctgccccagcaggccaaccctacactccattctggggactccatgtcaagttcatgcaaaggcccagttctggatgtgcctagaagctctgggtaagggctgaggtcttcaaggaataacagacacagcattaggtatggactatgtcagcaggtgtctcctctgcagtccgctctagatggtggccctttggttcccctccagctcaggccagctgcacagggccaggccctgaacttgagcacattgcccttccccaggctgtactcaggcagggaataaaatgcacatttacatatctcaccactagaattaactgctcaatgggagggtagggggacagaaaactgagacatgtcctgaggacccacacaagctacctgcaagtaagaggaagggtgacaggttatagggatatagacacagtcacaccaacccctgtgaacatgggtatgttacttggcctctctgagaccatcttttcccttccaagtagtctgtttatgcgaatttcgtaaatattgggaagatgctgtgcatggggaggggtcatctatgctgagaaggctgcctcagcctgtgacataggtgcggtaaacattcacattgctattattaggaatctcatagtcatgtctgaagccacggctgggtgatccctttgcctgctagaccaccattaagcctgaagttggagagaccccagctggcgtctaggtcgctgctgtagaattccataagtggaagagggtctaggtttggaaagtagggattgaaagagtgcgggcagcaggcaatcaccctaccatcaccctttccccctgtacccccttcactttccctcccccactgctgctaccaccatcttcctactgctgtgtgaagaattaccacccccctttgggtcttgccacagcaccttctgttatcccacagttctgtaagtcaggagcctgccacccagcaggtacacacacacacacacacacacacacacacacacacacacggtctcagtgcttcagtactacagctgaacactccactgattcttggttattagcaaccaagcactcactggtgatccagaatccagaagagtgctcgagaatgtcgatgtcgacaccagttctcccattgagtgctcagggcctcacctctcttaccctgagcatcttcagatggcctgtgaagtgtccgcggcatctgctcttcagacctgctttgttattgtgcaaagggggagtctggagaaagtgcatgtagttgtgctgattgttcaagttgcatagcacttttcttgggggtcacgggtccctgggtggtgaaagagacataagacaagttttaacatacatcctttaccatcaagcctggagtccctctgtccgtgcaaggacggggtggggagcctggaagggagaagggttctggcttttcagataatggatgaagtgtgactatcagggacaaggggtggcagagggcagtggtgggtttgcgctcctatagactggggagacaattttgttggaagtctctagagctcatcccaggtacagctggttctgtctgtcaggttgaacttgagagtgggccagggggcttctgggatggtcacactcttctggaaagcgaggcagtacgtgtggcccagccacagtcacgtagataacccaccaagttttagcattccatcagtaaaaggcacccccccccgttcctatagaccaatgtagcacgtctccacagcaaggttatagaattctgctgataacctgaggcccacaggccacagcgatatatgcaacagtctgatgaccagaggggaagaaccctctcgatgggaggcatttcctgaagggattgtccctcttaaaggtgtttctatctgggatgttccaattcctacaccagggaaggtgtctattttgctctgtgtggatttaaagtcaggattttaagtcaagctggacagtaaggcttgggtgctggtctaggtttaccatctgctctcacaggcaatgagcactaacccagacaccgcacaagtcagcgtgctaggcaattagataagttacctgtgcctccctctggcctcagtttccctctcatcatagtgggaactcagcatattctatatgctaaagatcggccagaatcccactaatgtttctggcattgggagaccaaattgtttccaagagtgatgcgtatttctcaagtggggcattgtcctggcctccagcagcatctcaccgaggctgtctgtctgtcctcttcccagcagccggccccggtccctgagcccgaggaatggagaactcctcagcagcttcagcctcctctgaggcaggaagcagccgctcccaggagatcgaggagctggagcgcttcattgacagctacgtgctggagtaccaggtgcaggggctgctgaccgacaagacagagggtgacggcgagagccagaggacacagtcccatatctcccaggtgaacactggcccaggtccaagggcttctcgaactcaaaggcacggtactagggaccttaattctgactgtgttgttatcatttctcctcacgctactgtgatctcagtattggtgatctcacctgacacagcatccagaatcctggaggagagaggtttagagatccatccaggaagccttgacctctgctgagcacccttgacctttgaacccatctctgggacccaagcagaccaatgtctctgtgtcctctatgagcttatattctagagcagctctggagaccaaagctacccatcacgcatgtctttggggaactgtgactccgacttcaactacagacagttgttgggagcctaagatatgtgtcttctgtattgctctacagggtgctgtatgcctatgcacttatgtatgtgaggcattcagagaagaacctcagggtgctcccatctgccgggtcagtctgtctcaacttggccttgcaggggaggtgatcttacttggaaaactatgggctgtgatggctttagcaacctgtcatcacacacagtacatccccagtagattcttctgagagttgcttccaaatttggttctagatacccatttgaccttgtgtgaagcccccaatatcagaggctgttttcttttctcttttatttcttgnnnnnnnnnnnnnnnnnnnnnnnnnnnnnnnnnnnnnnnnnnnnnnnnnnnnnnnnnnnnnnnnnnnnnnnnnnnnnnnnnnnnnnnnnnnnnnnnnnnnnnnnnnnnnnnnnnnnnnnnnnnnnnnnnnnnnnnnnnnnnnnnnnnnnnnnnnnnnnnnnnnnnnnnnnnnnnnnnnnnnnnnnnnnnnnnnnnnnnnnnnnnnnnnnnnnnnnnnnnnnnnnnnnnnnnnnnnnnnnnnnnnnnnnnnnnnnnnnnnnnnnnnnnnnnnnnnnnnnnnnnnnnnnnnnnnnnnnnnnnnnnnnnnnnnnnnnnnnnnnnnnnnntcagcattccagggcacctcttgtagtgcccccttcaagcctgggtattcacgcaagggtaagctacttgggacccctgccgtagagaaccgccaaatgtaaccacctagctcactgcccagtaaggaggaaaatgtagtctcccactgtcttagtcagggtttctattcctgcacaaacatcatgaccaagaagcaagttggggaggagagggtttattcagcttacacttccacattgctgttcatcaccaaaggaagtcaggactggaactcacacagggtagggacttggaggcaggagctgatgcagaggccatggaagaatgctgcttactggcttgctccccctggtttgctctcggcttgctttcttagagaacccaagactaccagcccagggatggcaccacccacaatgggccctccccgattgatcactaattgagaaagtgccttacagctggatcttatggaggcatttcctcaagggaggctcctttcttgtgataactccagcttgtgtcaagttaacacacaaaaccagccagtacatccagctttttagaaaccagaatgaagccgagaccaggagtcagcctgggacatcctttattattttttttttcaaatttttctccttcatctccttcttaatgttcatttatatattttatatatatgagtacactgtagctgtctttagacacaccagaagagggcatcagatcctattacagatggtcgtgagccaccgcgtggttactgggaatcaaactcaggacctctggaagagcagaggtcagtactcctaactgctgagccatctctgcagcccagcctgggacagccttatgtagcaggagtcccctgccccatcccactgggctctggggggcagaatagagtcccctgcagttttccttagagcccttgatgttctaatgccacaagtatgtgggctcctaagcatctatcctctgaaggacctgggaggttttggaattgggagtgtgtaaaagctcaccttcctggaacttcttctcccgtgctggtgaccgtctcagccaggacggctactacacgcaactgagaagcccacagccggggctcatttgtttcttttatttgttgaagcaaagttgcagggttttttgtttgggtttttccgctttgtactatcagatggtttagtagatttaagtgcaagcattgagggagcgagagagctcttaaagggacaggacacaccccagtgcctgggtagggacttctcaagagagttgctagtttggaaaattaaagaatggtcagggtgaggtcagtaaaatggtagggaaagggatcaggtagtggataaagagcttgcataccaaacgtgggcccagaagccaagactcaaccaggagatagaatactggagcaagaggaagagactcaggttgacgaagtcaagaagggggccgcgtagacaggaggtgcagggctgagcctgggtcaggggcccctggatagatgagagaggaggaggaggaggaggaggaagaggaggaggagtcaggagagccggctggaaggaagccaaggcaggagcaatgccaggatcctggaagaaggaggatttaggaagtggggggggaggggtgggtcactttacggactgctgctggtcttggaagaggacagcatccctgacagagcaactagtggcagtggctggagaggccgcagccaagagatggataagggcagcagcgggagaccaggcttgttactgccgcttggagctcaaccaaaggggatggcgatgtggaggcattgtagagatgagggccaaaggagcgtagccggattagttaaaggcccagggtgagcggagtgggcagagcactggatctgttcacctcccagcagcccaccctgccaccacacatgcagcatgacatctgccacagagctatgggagactcccagtgactttcagccaccacagggctgcagtagagtcaggaagatggtctcagccaaggctgaaatatagtggagggaaatcagaaggaagtccagggaatgaggatagtgatgtaatcagatccccaggcaagggagggtggagtgggcaccaaggcaggtaggcaatgcgctaatgcaggggttctcaacctgggggtcgagaccccctttagggtcaaccaacccattcacaggggtcacctaagacgatcagaaaacacatatatttaattataactagtaacagtagcaaaattgcagttatgaagtaacaggagaaatcattttatggctggggcgtcaccacaacatggggagctatattaaagggtctgtgcattaggaagatcgaaagccacttctctagtggattggaggccagggactgaagctttgccggggttctggtactagacggagtgatctgggaatccaaaagaggcgtccaggagtaaaatctgttgaagatggaggggtgtaagaactcagaggaaggggatgacgtaagtccaggggtctgtggggtgagggagaagcacagaggccgacagctcagtcaactctgggacagcctgggacagcctggatctccacaagctcatgaaaggacacacacacacacacacacacacacacgcacgaacccaggaggaatacagttgtgcgacaatggggagtgacctgctgatctataaaggacttcaagatggcaggagtgtgtctgagggcatgaattgatttgtactgtttcatttcttaatttaaaccactctcttatagaattagcaatatcgtgacctgaacgataggtggggggagtgggagacatgaatcagaaaattcctaaggaaatttaatccgtttgggttgtctggggcaatgccttagtcaccgtcacttcgttgtgatgaaatgcctgacgtcagacacgtatgagaaggacttgggagatggctcagtgggtagagtgcttgccacacacggacgggtaaggacttgagtttaatccttagaaccaatgtaaagctgggcacagcagcacagatctgtaatccagggactcttccagttgtgtgagagaggagggaagggagtccgtggcgctcacagggtggcagcctcgtgcacacggtggctagcaagaagagagaaaagnnnnnnnnnnnnnnnnnnnngagagagagagagaaacattttttttaatctagaaaaaaaattatggtttcagaggttttggccatcactgagggcagggtgggaaagaacagagcagttcacattgtgaggtacaggagtagagtagtaacagaaactgccaggggcaagatacaacacacatacacacacacacacacacacacacatacagacagcagtatgtccacacacatgtgaatatgtacacacacacacacaaacacacacagcagtatgcccacacacatgtgaatatgtacacatacacacacacacacacacacacacacacacacacacacacacacacacggccaccaccacacataggcctctttcctccaacaggcccaaggtgctgccacctcccaacactgtggaatctgactccatctgtggactcagccattcatcgaatcagtgttctcatgatccgtctgcagaaatctcctcgacacacctggatgtcaggatcttctgcccgtatctaaatcaaatcaatttcaaagggaagaaatgttataccgggaaacagcctgagctggtgtccttaggctaacacctcaagctcggtggaacagacagagtgggggagggacaggcagacagacaaacagatggacagatggacgggtggatggatggatgaacagagggaaggggtctgaacaggtagtagactgtccaccggctagctctgcacttcttactgctgctagcttaggcagacttcacttagacttggacacctgcatctgagatagatccaggtagccaggcctctgcaggggctttcaatagatgtttatggtttgtagtctgagggaaactgacattcctgccattagagtgcattccttaaactttctgcatgctctgaggtttgatgggagcatgcacgcacctggcctgactgcacctggccatacagaccgtctgtatgctttagaggaagagggacttccccagagtgcctctccctgtatccataaccccccgccccagaagagagacagaggtggccggctttactcgggaccaagactagacccatcatccagagacacttttaaaaaatctgcgattgacacagctttgtaagaaatagttctgctaaatccactctgcttgtttttatttgatctgatgactgctttaaatggaatttttaaaaacacagacatacaaagaatgtctctgcctgtctgtggtgctgttttgatatttctgagggagaaatttgctaaggttcttggaaaccttgagaaagtgtgagggagtggagaatattgttcttctattggtgacgggtgtctttgaaatctgagcaatggcagtggacccttgggaagaaaatgcctcataaggcctgcacacgtgtgtccccttccctgtcccagcaacacaagaaaagttgggagaggggagtaaagtggataggttggtagatgggtacatggatggatcagtaagatgatagatagatagatagatagatagatagatagatagatagatagacagacagacagacagatggataattaggcagttttcatcgctgtgacaagatgcctagacttacttttctgtctttttttccagtcgtgatcagctgactcaccatttctggggtgtagttaaggcagaacaacatcacagagaacatggtgagagaaagctgcacactgcatggcagataggaggaagagagagacagaggaagaggctagagacagaatacacccttcaaagacacagccccaattcctccaatcaggtccttccttctgcttgtccatttaagtgtggatagatccattgatttgatcagcacctacgattacttctctaaagcctcacctttgagattacactggagaccaagccttcaaccatgaggctttggaggatatccaaaccacaacatatgaagaataggtagataatttgattaatagacagactgactgacagacagatggatggatggttgatggctggctagctgacagacagannnnnnnnnnnnnnnnnnnngtgctgccaaatgctgaggcgaggaagggtcttctttcctgtcctgggtcagcattccaggggcacctcttgtagtgcccccttcaagcctgggtattcacgcaaagggtaagctacttgggacccctgccgtagagaaccgccaaatgtaaccacctagctcactgcccagtaaggaggaaaatgtagtctcccactgtcttagtcagggtttctattcctgcacaaacatcatgaccaagaagcaagttggggaggagagggtttattcagcttacacttccacactgctgttcatcaccaaaggaagtcaggactggaactcacacagggtagggacttggaggcaggagctgatgcagaggccatggaggaatgctgcttactggcttgctccccctggtttgctctcggcttgctttcttagagaacccaagactaccagcccagggatggcaccacccacaaagagccctccccgattgatcgctaattgagaaagtgccttacagctggatctcatggaggcatttcctcaagggaggctcctttctttgtgataactccagcttgtgtcaagttgacacacaaaaccagccagtacatccagctctttagaaaccagaatgaagcccagatcaggagtcagcctgggacatcctttattattttttttcaaatttttctccttcatctccttcttaatattcatttatatattttatgtatatgagaacactgtagctgtctttagacacaccagaagagggcatcagatcctattacagatggtcgtgagccaccgcgtggttactgggaatcaaactcaggacctctggaagagcagaggtcagtactcctaactgctgagccatctctgcagcccagcctgggacagccttatgtagcaggagtcccctgccccatcccactgggctctgggggcagaatagagtcccctgcagttttccttagagtccttgatgttctaaagccacaagtatatgggctcctaagcaactatcctctgaaggacctgggaggttttggaattgggagtgtgtaaaagctcaccttcctggaacttcttctcccgtgctggtgaccgtctcagccaggacggctactacacgcaattgagaagcccacagccggggctcatttgtttcttttatttgttgaagcaaagttgcagggttttttgtttgggttttttgctttgtactatcagatggtttagtagatttaagtgcaagcattgagggagctagagagtgcccttaaagggacagaacacaccccagtgtctaagtggggacttctcaagagagttgctagtttggaaaattaaagaatggtcagggtgaggtcagtaaaatggtagggaaagggatcaggtagtagataaggagcttgcataccaaacgtgggcccagaaaccaagactcaaccaggagatagaatactggagcaagaggaagagactcaggttgatgaagccaagaagggggccgtgtagacaggaggtgcagggctgagcctgggtcaggggcccctggatagatgagagaggaggaggaggagtcaggagagccggctggaaggaagccaaggcaggagcaatgccaggatcctggaagaaggagaatttaggaagtggggggaaggggtgggtcactttagggactgctgctggtcttggaagaggacagcatccctgacagagcaactagtggcagtggctggagaggccgcagcgaagagatggataagggcagcagcgggagaccaggcttgttactgccgcttggagctcaaccaaaggggatggcgatgtggaggcattgtagagatgagggccaaaggagcgtagccggattagttaaaggcccagggtgagcggagtgggcagagcactggatctgttcacctcccagcagcccaccctgccaccacacatgcagcatgacatctgccacagagctatgggagactcccagtgactttcagccaccacagggctgcagtagagtcaggaagatggtctcagccaaggctgaaatatagtggagggaaatcagaaggaagtccagggaatgaggatagtaatgtaatcagatccccaggcaagggagggtggagtggnnnnnnnnnnnnnnnnnnnntatgaagaataggtagataatttgattaatagacagacagactgacagacagatggatggatggttgatggatggatggctggatagatggatggatggacagatagacagataaatagatggatagatgatgcaatagttgatgtcaaattgagtctagaatcacttgagagacaggcatctaggcatgcctatgagggatgtgggaaatgaaagatatggagaagcccattgtgattgtgggcaggaccattccctgggcaagaggtcctaaactagacaaagcagagagaatgagacaagcacaaacacaagtccactgctctctgttctttaccatggcgtgataggaccagctgcttcacgctccagtcacctgacctctccaccatgacaggctgtacttctaaactatgaacaagaggggaccctctcctgggggatgctcttgtcagagagtttttatcacagcggaaaaagtaatgaaagcaaatgagcaactgtatacgtgagtagcatcccagctcttccctaataccacatttaaaatcccacccgttgccaacaacattacaagccttttctcttgcacaaatgtggtgtccacacacagatacacacattctacacataaattgttaaagattgaagacttaaaaaaaaaaaaagaaaaagaatgcttattttctaatggattctgagtccccgaagtcacttcttaaaagttttccttggggccgaagagatggctcagaggttaaaagcattggctgctctttcagaggactggagttcagtcccctggtggtagctcatacattatctgtaactccagccccaagggacacagtgccctcttccagcttctgcaggcaccattcatcgtgtatacacatacacatgatcacacaaaatattcatacacgtaagataattttttaattaaaaaatgctgtcctcactccatccttagttaggagaaggacttggctttgctctgcgtgtgggaaattgagccatagacttggtaagcagtacagcactcactcttcctggccctggaggctcaccccgcccactttcttcttgttcccagctgtaatggatagagtgtcgagtggttaaggtatggagagagaattaggactcaatcttattagctcttggccctttttaggggaggtggggatgctgtggtcggaaatgcttggcgcctctgatgttggtaggcaatcaggttatattcatcagaacagcattcacaaccagccaaaccggggcacaaagatgttttaagataactcaaggtagcatttattttttcgggcatggttgtaggctctgaaacaaagtgataaacagaaccagccatgagctgtgccttgccagctcttgctttctggtaggaaggatggaaaataggggactagaaagcaggcattggtatgaaggaagaaggagaaggaagccggggctgttggaaggaggccttggagggaagatctgaaggccacgagagtgaggttacttagaaaagagtatcccatgcagtgggaatgaccaaagctgagctctggggtcagggtgtagaccacagtcaggcagagggcagtctggtagttgcctagcacagaggagatatggccagtgagctgggcatcagggcctccttaaaagcctagagagaactctgtcagtttgaaatgcagtagagtgtcccagcacatggaccttcataaaaccttgtggatagtttaaagtctgccccccccctctctctccctttttattttgagataatcttaaaagttcctatcttttacaccatgacctcaattgttaatatagcacatttactctgcctctcaatatatacttgtatatttaatacacacacatttattgcttgtaaaagaataagaagaagaacagacacacccatacatacatactcccaataggatctgtacagctgttagtctctttcatctctttcacatcatctttcacaatgcagtatctaagcggctggaaaatgggaagtctggtatggcttgtgcttccagaaccctgtcccacgtgcttggttggcttcatgcttctgggcctggagtgaagaagagaacatcccagcagaaggcatcaccagaggagagttactgtcttcctggcagtcaggaagcagagagagaaagagagagagagagagagagagagagagagagacagagacagagacagagacagagacagagacagagagacagagagagagacagagagagagacacagagacacagagagagacagagacagacagacagagacagacagagacagagacagagagatacagagagagagggggagacagacagacagacagacagagacaggaggggaccagaacaaggtgtcttctcaggcaccacccccagggagttacttcctctaacagatcacacctcccaggattaccattgtagtgtgtctaccaggcaattatccatcaggtcagggcctcagaagccagttgcctctcagcaaagagagacggctgggggcccagtcttcaacttttgagtgtttgaggaagatacttcatatccaaaccataacaataacaaaacaaacaacagaaaaaccaaatctggttagaacactgaaaccaaagctgaacattgcatttagaatcagccaccttatctatctatctatctatctatctatctatctatctatctatctatctatctacctacctacctatctatgtatctatctacctacctacctatgtatctatgtatgtatgtgtatctatctatgtatctatgtatctgtctgtctgtatgtatgtatgtatctgtctgtctgcctgtctgtctgtctgtctgtctgtctgtctctttgagttaatggcccttggctcgttctaacacttttttgatgatatattccttgtcaagctgcttaatgctactgtgccccaggatccacatgtgccaaatgaagaaaataaaagcatctagggggcttgagaaccaaatgttaatgggttgacaggtttagcagaagccctgattctgctcagaaagcctcgttgttcttgtgtttagtccgtgactatgcatgctgcaagtagcctccaactgtcttcctccctcccacccttctttccctactttctcccttctttgattcctggcacctacacaggagttttaaattttgatgtggtttgaacttgtcctgggggttttagtcaacttagaactgttcccaggaatagttttttatgtggttgttgataagtctctcctaactcctcttatggtatccaggtatggtggcacacactgtgaccccagttcttcgatggtgaagttaggaggatctgtattttgaggccagtctgcactacatgagctctttgaaaaaaaaaaaaagaacacttgccatgtgctaaggtctcactatgtgctaattgtttgtgtgtgtgtgtgattttgttcctctatcaactcaacatatggtggagtggtttgagtgtaaaatatcctccacttggtccccgccttctgttgtctgggggatatgggatcattagaaggtggagacttgctagaggatgtgcctcactgagctggcctggagatttagtagcctgaccccacttcctgctcaccctctgcttcctggtcctctgagatgggaagagtcccagccttagctcccatgctcgactccatggggatgaacagcacaccctaaagctgagagctagaacaaatccttcctctccaaattgctttgtcagcaatggtcggagtgaagaggaaagtagttaatacttgggccctgaccctgccagtcatcagtgttgatgttgggtggggctagtctgaggaagcctttgacactgaaaagtgggcatttgtatcttcactatccctgccctactctaagccttgaccttcctcctcctgctccttctactcctcctctccctcctcctcttcctcccagtgctcactgccacatggacaaccccgtccttcccaaactttgctaaaagggtatagcacatcacgggatgcaaatgactggtaactgactataactgtttgaattgtgcagtgtcttttaatgtacagtaaagaacagggagtgatgggataaactcttaagttcagaataaacatttacattccaagtgtttgtcaagtctttaaccctgtgtcctattcattccacgctttaaaattaagatataaattacaatatgtggaaggtctaaagccacagttgcacacgtatgtgcattattcccacgtgtaccattccccacatgtcctggctctttttctggatgcccttggccaggaggatggcaccccaagcccctagacagccttcatagtcgggaggtacaagatatgggcccctttgccctgaaggacagatgatccatgagcaagatttcaggcttgtgactgagtgtttgagaggaaggggcctcatctgctccagaatcaccccaacagatttagctagtttttggggtgcctaccagagctttccagacagcatctcagagggacaaaaggaaacaggcaatgcatggtattacaggagaggaaagaaaatgttatggttggcacccagccattggctgaaggagttttggaggggagttccccaggactttggggatcagggagaggcatgtgtccccatgaacaggcagccttgtaggaatgataccccaggcttctgcacaggtagaccattcaagaagtccctcaagcccagtgggtgatcaggtgattgttcatgcttggtagctccctcgggtgttagggtgatgttcagatagaaccactgtctctttcctactaggccttgggcttgtgtgggactcgctggttctgatggttctacaggctcagtcactgtgttccccttcccctacatggaacactcactttctgctgcttggccccaagctctacatcccaacctcatttccaactcaactgttattaaaaaacatggaacctggccctgacccactactcactgggccaggtctgcatctctagccactctactctggtgctgcctggctctgtccatggggaaaatggtgctgacttctatggcctgacatcagtagtatccctccaagctaccctttgtctgtctctgttttgattctgccaagctctttctttgggaaccctcagtgtgtgcttgtgggctacccgtctccttccctccgaagcccccgtgggtatcctgctcttcctcatttctgtcagacatcctcatccccttttgtactgccgctggcaaatgctctgttaggagttgctcagaagtgacttggtgggcacaacagagctatcttgctaggcctgggacagctcaccaggtggcgggctagcacacagatgtgtgtggcaccttccttggaaggagctgcactcaccagcaagtcaccactctatgggatgtcacacccacgctgttcagcagtgtctaggattcctagaaagagagacactagcaatcgccttcctcctctgctgtgtccttgcatggctccagggattcccatatggctgggatagagaacgagtgacagacagatggacacacagacacaaagctaaggttaggggtctgggctctcagatggagaaacctcagcaccccatggaagtccaccatgtttattatatagatttgaacagagcggcaagattattgctgaacaaagaggtggggttattatatacattatggtatacagctggaccaaggagatgcctttggtttaccacagtaggagcaacctcagtagaggagcagtgttcaggctgtaaacatccagcagggggagctatgacaaatactttaggcatatatggtcaacactcaacactagtcccccaaggaaggcttggccatccctttaggcctaaggctgtagggtccttggcatggcttagcctatatcaacaacacacattcactcggcttcactcagggcttccttcagagcctacactccttggttatacccacgctgacagcctcgggtggattccacccaggagaggagttgtgccaatatgtaaagcaaagacatgctcttataatgttttaaacatgatatacatacacatatcacatgtggatgtatgtatgtcttccctgaatatgtatgtgcacatacttacatgtgtatatatacttattcataatgtatatctatgtatgtcttcacatatattactttttgctttttgaaattattgtagactcgtagggaacgtgaggcagtagttccaagtgtcccctatcacccaccttcccctggtatgaacgtcttacataaccatgttgcgaggatcacagtgaagacactaacagggatccatgtgatactgattgtctagaataactcggcgtcatgtttggctgactttaggatgtagttggaacgtcactgttttgtgaacttggcttccccgggcatatacccagggactaccttggacctacaggtcacagcgatgggtttgccatcagcatgccaagtcggatttcctaatgggtctgcagggaggcaggcggagtgagggtgagcttgtgtgctgctgtcactaacccttcttttctgcctgcagtggacggctgactgcagagagcagctggatggtagctgttccttctccagagggcgagccccgccacagcaggtagggaaccagctctgtgccccatctacgagctgtcacatgtcctgcttttctgggaccttgggccgactcttgggtgactttcctaaaggatggggattaggagtaagcagaaagatgggtgcaggaaggtaggggcctctaggaagcctcccttagttcccgtgccgccttggagttgcccccaccacaacacatgggctctgaagtggctctgaagtgtatcattttatggaatgatacacatttggcaaaacctagatggcggctgagaggagggtggtgagatcgccttgtgtggtgacttatcctttcgggatactgtgtggcgacaggtgaacaaactagagtttggctcctggccttatgggcccacaagcactgggtttcttgggatttttggacctgacagtatattttgaagatcctttttctgggtctgtggaagggctgggtcagtagagcctgtggaaaaggagcttaaaggtctggcgtctccagtctatagctctcccggcatttggggctctctcctgccctgggaattctgacactgcgagtgtgtgtgacccacccagaggtcctgcggggctgtgtggcctagagggaatggagtaagttattcctggtcacctgggtgtcctacctccccagctggtctcagagatacctgtccctgcctgtgaaaaaccatgaggttaggagctgaagaaaccacttgccccaaccacgccccacttcagactctatacctcctgatcctgtcgtttcagggacatgttgcctagctcactagcttggtcccacctcagttccttgtgctacttagaagttacccgtcgctggggatgcagctcagtggtcgagcatctgcttagcatgggcagcttctaccctagcacggagaggataaaaaaatcaaaacaacgcgccccatctctaacctgttccaaaggaagatgcttagtgtccttggtccgggattatccctagggtgcatggctttgctgcatcttgtctctcccaagctgtggggaagacagctatcttcaccgttccctcttataacatttgggtcattgtttctgtctcggttgggggtttctgttgctatgataaacaccatggctaaaagtaacttgggcaggaagggatttaattcatcttacatgtctatatacagaaatatatagaaatattccttccttccttcactgagggaagtctgggcaggaactcaagccaagcaggaacctggaggcaggaaccaaggcagagataggagagggacactgctcattggcttactcagccttctgtcttacacaactcagggttacatgaccaggattagcaccacccacagtaggctgccccccccaatcaatcattaatcaagaaaatgcccaacagacttgcctataggctgatcttaggaaggcatacctacaactaagagttcctcctcccaaatgactataggtggtgtcaagttgccatgaaactaatcagcagcttatttttacaatatttatgttgattgtacagtgtttgatttgattatgacctttccactcctgcatattaaaccgtggagctgcagctctgtggcagaggggaggcagaagcctagattctggcttctcttttgctaataaacatagtggccaaattcttcctcctcagatggaaaccagaggatcctgaatgccccctgggcgtctttttttggcacctctgccccatttgcagaggggtaaactgagcacacaaagaaggaggccttgtctgagctagactgtgcaccttgcaccccagtctcttgtctgtgcttctgcggcccctgtgcagctcatgtacttcccagggaatctctgtcaccttggcctaagcgtcacagctcagtggctccgtctccagtgtctgctgtcatccccggctcttctaacagagatgacaggcttagatgtggctccaagcaggggtggggagctagacaataagaaatgcatgtttcttggtcagtaggtatctagttctggaattttccagggtaggatccttcattttcttttgtttaccaccttccctgaggctcctctctctgcctttgccctctcatcctttcgctctagaggctggggatggccctgcatggggagtcaagagtgcctggcagtaccttgtgccagtgtcagaaggcatgatgtagacttgggggacgagtgacacagggcagaaacacgggatggaagtcactgtcttcttttccctgacccaggtaggtatttagagcagtctagctattctgcaaggtcaggttggctccagcctcctctctgcttggtttgctattcttgggcatggcactcttctataacccgtgctatcccctgccatctctatcccccaccagcaggagtgccacccttcatctcatccctagaatcttgtctctcctcttggagccgccatcatgagaagactttagtacaaccaatttaaacttagctctgactagcttacaaatgaatgaaactcaggctttggctattttatttgacaattactggggaatgcggggggggggtaacccctagtctacttttctcctggcctggctaccctgtcagctgtgaggtagaccttctggtacagacttgagcattataatatatagcaacagaccaaaccacaacagaagacctctaggaaggggttagagcccatcacaaaaagccccaggtagctggcctgtggctgcccttcctggtcttggagctttggtggagaggggagcatcagctaggcatgggtatccaccctgcattagcacacccaaattcctccttactgtacttactatgtaagcaaacaccctcacactaactcatgtcaccctcaagctgttccctaaaccccacctgccccgtcagccaagcaaccccaagaaaagatgtgtcactgactctcatgtcccaagcctctaccatggggccttgcatgcactgggctcagtaacagtgctgaccctgcctggaactggccaaggctcagctatgcaagcattcccagagataccctttccttagacctcacagagtctgagctttctggagttagggttacctgggttgctgtaaacacccagttgacagttactgctaagagcaagctcctcctctgactgctgccacacctggaccactggtaccaagaaagcagaggtcatcaggagccggtgaggatggagcagggagagtgggcttacccaggcaagcatggcattgcctgaccctgaaccagaagctaggggtgggtggcacccatggggctcagccattctttgcttatttcaactcattccaaacaataccttgctctctctgggatgccttcaggcaagtcagggatagcccgcatcccataaagtgggaggaagggagtccagactaagaaaaaaaaaaaaaaaaaggagccaaccaagtgccagaaaccaggattcaaccatatctggcagtttgtcaccctgcctcctctttccactagtcattctgtgaagatgatgggacatgtcctggctgtcaccacaatggggaaacacacggtgatagctgagaggacagctcctgacaagagagaccaggggcagtgcattcagagaccttgaccatgtgcaacctggagggggtcggcaccatctgctctcacatgccaagggaaggaaataagagtataaaaagagcaacagagcttctgtctagactttagaaagccttcctgaggatttggtggcccctgacagttggctctcacgacaatggtatcattgctgggaacctgatcgacataccttcttatcagatggttgacagttcctgaagccctgggaaatctgggggagtatgagaaatgatgtcaagctatggctgatgtcccataatcccactttttctggaatgatgggtgtggtgtaggacatcccgatatgagagggaaagagccttgccctgaggtgaccctggagtaacactgttctatttacctcttccaccaataagacattggcataggtctgggtttctgtgccaacctgcaagctggtgcaaccctgacagactcaaaggatggcagatggcatctaggaggacatcaaacactccagtcccctggccctgacaacgggcagacgaaacttcatctggctaatatccagcaatggcagagtgtggtttgttgacagttaaggaattgttagtacacgtgataccttagtaaaagcacctggttccttaaatgtgtctgtgtggtagggaaaagtcctcaccaagttcgtatattgctctctgtggaattggtacttactgagcgatactggatgcttggccagagtatagctgctggagtcctctgtgtcatcgcctgcttgtaaagagtgaactcaagatgtgtacctgaggtaccctcaacagactattgtcattctaaagaatggccctgtcagtctccgggaaggacatgagaatcgatcccttcctttgggaatatgtaaagtgctccggtagatggaaagggggaaaagtggagaagggaagattagcaaaaatggagttgggcattgtattggagtgctggggtggtaggagcaagcacagctagcaaagatggctcgtgctgggtagtactagctagaggggctgatcatgatgcacgcagaggtatctggtaggctgagatgttggaactgttgtccaatcttgtcaacaaattatcttatgtttttctctgatgtgaagtcagtgccttgtgtcggtcagtacagacaagatgctgtgtaacaagcaatcccaagtcttagtaacttcaaacagcccactggaacccagctggagggtgcagttgcctttttctgagttaggatgtcactatagaaccaggctggtctaaaactcatgatcctcctgcctcagccttctaagtgctgggatcataggcatgtgccaccatgcctagcttcatagctaccacttttacccatcagcacttggagaaaagagctcagaggatcttgctttggtggcttatgccgcaggccaggtgcaccatccatttggctgtgagctgtacacagcccagcctttgaatgcgaagctctcattgccgaagaataccctttgtcgtgcctttgcttcagtgcttggtttcccacctgttgtcttcctcatagagctggtgtgtcggcaagctagctgacacaaagtttgaagtagaattccgtctcataacaggaaagcatcctcatttccatcagaaagccatttgtcatagcaggaatcagaagattctgaacagtgacagagattggtgactaatgccaaccctgagatgctcagtcaaccttcatcaaaattaaacgtgtgccctggaaaagatcacacagagaggctgaagcggtgaaccctaggcagagagtgtgtgcacagcccacatctgaccaagggcttgtagggtggagaaggaactctcagaacacattagttatcccatgagaaaggcttgaaatacatgaagagatgtttccattgaggaactgcagacaggaactgagcgtacagaagacccaccccaccccaccccaactagccctcagagaaatgcaaaccaacccgtgtgacattaccgtgctctaacagctggcgaggatgcacaggtgggggatatacaacacagccattccacatgtttgtcggtttcattaaaagaaagaaaatgaagcctttgagaaccctgtgatccagcccgtgcattcctgagtgtttgtcccagaaaaatgaaggcttatatttacactaaaacctgccctcaagtttgtggcagctttaccagagtgggaacctgagagcaccctgtgttgtctagtcttatgtcaacttgacacaagctagagtcatctgaaaggagcgagcctcaattgagaagatactccataagatctggctgtaaggcattttcttaattagtgattgatgggcaagagtctactccgttgtggacggttctatccctgggctcttggtcctgggttctacaagacaacaggctgatcaagccagttagcagtgttctcccatgacctctacttcagctgctgcccccaggttcctgcccagcttgagttcctgccctggcttcctttgatggtgaacttttgtgattgtgtaacatgaataagccctttcctctcccaacttttggccatgatgtttcatcacagcaaaagtaaccctaagagacaacccaactgttgttcttcagtgggcgagcagtcagtggtaagtggcctgtggctacgacaaagccctgggtgaatctcctgatcatgctgtgtgggaaaatcctagtcccctacggctgcacactccgagattccatgtctgtaatgttatggatgtgagaggtagttgttaagtattggagaggaagtagagtattggaaggatagggtccggtgtggccagaaagggagccacagagggagccctgtagtgatcttccctggctgaatcagtgtcagtatcttgaaggtgacaccgagttatatttttatgcatttctccatggagggaagatggagtctgtttgtattatttcttacaagcctatgccaatgtatatttcttacaagttcaaacagccgtttaaacacagcttacctttttaaagtatagagagctctgtttcttcagaatcttttgtggcgtgtcagcattgctagccgttaggaaaatgcaagctaaacccacaccgagatattatcatgctcctctcagagtggccaaggcaagtggagattctcaaagtcgggaagaagagatttggcacccgctctctccctgccagccctgggctcacctgttttaagtagacccaggctgtctgatctccattccctctgtggtttgaggctgatgctactaggagagatgcagaccagggtggagttaaagaggacttccttattcaaggaggcatattgtagggttggatggcgttgggtacagctgggaaccagggacagtaggccctattgtttcggtggagtcccgacagataactgtctaggagtggcttgtgagatggctcagcctggggtagactcagctagcacaacccacttaaagcctcagtcgcgtgcccagtcaacagatagtaactgggagggctggcctagaaggaataccttggccatgggcttcagcctgtctccacctctccctgccctttgagtggaaaaggagcaaagagagatgggcagagaggcagaaggtccgaagtgaaaggactgggtgctccttttcctcagcccagctctgattccctgctttggtcatccctgctcagcccttctccggcctcaaaggcacctctgttgtgagtattgaacatgcctggttcttttgcactggcatttgagtgctgtcctttgtgtgtgtgtgtgtgtgtgtgtgtgtgtgtgtgtgtgtgtgtgtgtgtgtggtcgcattctgcatcaagagcagaatgggctgagacggaaaggctgtgagctgctaactcacgggactgcacgtgtttctctgtagtgccgggtaccagggtctgtctgtgcagccaagcttctggctatctgacgctgccacaacactcatgagcatccagggccagggctgggtctgagggcttcccccattctgtgtgcaacagatatgctggtgaatcctataggcacacctcccaagtctctggttagagcattgccttcagcattcctggtcttaggagcatcctcctggtgtcctgtgccctgttcagccaggctctgccagatctccaaatgtgcagcctgggcttctcatcacttcccacccccactatccataaacacaacttgccacatgctgggtattcaagagagagctagcccagtggcactccactgctcatgggcctcactcctttgatctcctgtgcacacccttccatgccccaactcctaataagctgctgctacacactgacattttcataatttgctaattcagcatgtcccagatgtttgataaggagcctttttgactaccctacctctatagttccttcagagcccaaagaaataaggaccagtttctaaaggtgtgttctggaccactccatggactacattcgaactaccagcactaccctccagtgctgttctgatgcccgctagcatctgaaagcctgggagcaccccagggagctgtgtcgggggagcacctcagggagctgtgtggggagcaacccagggagctgtgccagggagtacctcagggagctgtgtggagagcaccccagggaagctgtgcctgggagcaccccagggagctgtgtcggggagcacctcagggagctgtgtggggagcaccccagggagctgtgccggggagcacctcagggagctgtgtggagagcaccccagggagctgtgtcggggagcacctcagggagctgtgcagggagcaccccagggagctgtgcggggagcaccccagggagctgtgccggggagcaccccagggagctgtgtggagagcaccccagggagctgtgccggggagcacctcagggagctgtgtggggagcaccccagggagctgtgccggggagcacctcagggagctgtgtggggagcaccccagggagctgtgccagggagcacctcagggagctgtgtggggaacatcccagggagctgtgccagggagcacctcagggagctgtgtggggagcaccccagggagctgtgccagggagcacctcagggagctgtgtggggagcaccccagggagctatgccggggagcacctcagggagttgtgccggggagcacctcagggagctgtgccggggagcacctcagggagctgttcagggagcacctcagggagctgttcagggagcaccccagggagctgtgtggagagcaccccagggagctgtaccggggcatctcagggagctgtgctggggagcaccccagggagctgtgccggggagcacctcagggagctgttcggggagcaccccagggagctgtgccaaggagcatctcagggagctgtgtggagaacaccccagggagctgtaccggggcatctcagggagctgtgctggggagcacctcagggagctatgcagggagcatttaggaaggggtcagtccccactctgaggcaggtgctgcagttctgtgcacagtgtctaaaggtctggacccacagctactcagcaagctgcagtgccgcagaactgctgagctggacccatcagagggaagacgatgctcttgtgctggaagggttgtgtagaggaagtgctcccctgtgtctctgagtgtcgggaagggtactctgtggcagagaggaaggcagtcccgtgcattcttcagcccagagtaacctctgagctgccacaaacaggatgcagtccaagccacacagcatcctttcctgttacccatgtggcagtggggaaactgagactcccataacaggagtctagaggactgcagggttaggatgtgctgggatgagctccttcgtctctgtccccagtgtgacagtcacttctctgtgcaagtcctggaatagcattgggatggcagctggctcttggtatggtgtcccagaagtcagttagccagtggagtctgtctgcagcccccaccactgtgcacttctttgatgtctgtgagaggactgaacagatgatgtatgtatacgtgtatctatgtatagtgtgtgtactgtgtatacatatgacatatggtgggtatccatatggtgtatgatgtgtgtatgtgtggtgtataagtatgacatgtgttattcatatgtatgttgtatgtggtatgcatgtatatggtatgtggtataatatgtatggtacacagtatgcatatatgtggtatatgtagtatatttttgtatggtatgtgtgtatgtatagtgtgtgtgtgtgtgcatgtgttgtgtgtgatagtgtatggtgtgtggcatgtatnnnnnnnnnnnnnnnnnnnnaaaatttattcacacatggttacgctttggggaaattatgaggggatctctcagtgtatagtgtgtgtgtgtgcatgtgttgtgtgtgatagtgtatggtgtgtggcatgtatattctgtgtggtctgtatatgtatggtgcatgataagtatatatatatggtatgtgtggtatctatattatggcatgtgaagtatatatgtatgatatatatgacacgtatatgtgtagtatgtggtgtgtatgtgtatatggtatgtacatgtatggtatatatgcatgtatagagtgtgtatgtatggtatgtaatatgtatggtatgtgtggtgtgtatatatatagatatattgttgcatatgtatatcttagggttactatgactgttatgaaactccatagccaaaagaaacttgaggaggaaaggatgtatttggcttacatttccatattactgttcatcactgaaggaaatcaagacaggaattcaaacagggcaggaacctggaggcaggagctgatgcagaggccatggagggatgctgcttgcttgcttgctccccagggcttgcttagcctgctttcttacagaacccaagacctccagctcagggatggcaccacccacaatgggtgggtcctcccctatcaatcactaattcagaaaataccctacaggcttgcctacagctggatcttatagaagcatttttttcaattgaggttccctcctctctgatgacttttatcttattgtcaagttaacataaaactatccagtattttatacacacacacacacacacacacacacacacacacatacacacacacatacacacacatacacacacacacacacacacacacatatatatacatatatatatatatataaaatgtatagatttggtatgtgtggtttatatatgtataacctgtgtgggaagtgtgtgtgtgtgtgtgtgtgtgtgtgtgtatgatgcatgtggtatgtatatgtatggtgtatatggtagatatgtgtgtgatatggggtggtatctacatatatgtgtgtggtatgtatacatatacaatcatgagtcacatagtgaagtcttagtcagcagcagactacatgtaccacactgggcccgtaaaatcatagtgaaaannnnnnnnnnnnnnnnnnnnnnnnnnnnnnnnnnnnnnnnnnnnnnctgggcccgtaaaatcatagtgaaaaggatttctgttacctagcaacgtcatagccattgttttgtctcacacaaggcatttcccacagcgctgtggcagtgcctttacgttggtactactgtggtgttcaaatcagagcccaggtcatggtgggttctgtgttacagcatgggttcatgctataactgagaacaggtcatccgcacaccagctttgctcctcacacaccagttttgtgggcagggctgtggcccctcctctatgttgtgtcagtagctgcccatatggggatatgcccctttcccctgtcctggaactcactctgtagaccaggctggctttgaactcagaaatccacctgcctctgcctcccaagtgctgggttaaaggcgtgtgccaccacgcccagctcttgggtccgtttctttagtgtcccctcccatttgacttcagtaaccacagcttagttttgctctcctgaaactttatgtaaattacatcttacaaccagtactcctttgtacttctccgcattgtctatggggtttgtttgtgcagttgtcgcttgcgtttgtttattctcactgctgtgtcatagttgaatctgtgaacatagcagctcttctgtgtggtcagctgttggcaggcgtgtgggtggctcctggcccagcattgcctcgacgatgctgctgtattcttgtgtggttgcctctagggatgtctgtacttgtttctgttgtaagtacgtgtttacgcctaggcatgacttctgtgtctccgacttgcacgatgttggacattaggcttgggggaatgatgggggccgtcagaatgaagttgggggttggagggtttgctggagtgaccagcagccagagggcagtgaccacattattgaaatggtactaagtaaagcatttcctgtctatggggtgagccatgtaagatgtctccaaggacacaggccacagtggatgaaagcaggaaatgcagccttgcttggcctggggcttctcaggaggcaaggcttaaatgattcaaaactctactcctgcatggatgcttcagcacgcctggcttattggagcccctagccagggagaaaccactgtcaccagacaggcagtggtggtgaatgccatacagtcatgcagagtgtctgaggcattgagaatgaatctcaggcttcagcagcagagatgggggcatgttgagtcccgaatacatatctccggaaacaccgtctcagtgagggcctgcacttgccacagtgtccaggcctgcagtctccacagtgtcctcctgatgctcctgctacaatattcctttaggtggctccctccagcccctagccatgcaggctagccagccttaggtgtcagcgagggccccagtggccctctcaggcttggacctactgagcctctacctagttgtttccagctggccccataagtaatgccagcccctctctttgtctctttcagaatggcaacaaggacaactccctggacatgctgggcacagatatctgggccgccaatacctttgattccttcaggtaacttcctccttttttgtcagatgtccagggctggtgtgggatctcctgccatgcatcaggacttatggggtggatctggtatggaaacagatgatgaggctggaggggaaggagagactttagcagaggctccaagaaaggaagagccaaagggcagaggtcaaagggaagataggcagactgaaggggagggggagagcagaggagggactggagacaggtgggagcacggaggaaggggcacatggctatagtgggaggcggaggtgtcacccacccacacatacacacacacccttctcaccctccagtcaacagagaagagggactgggctctgtggcccagaggtggtgtctctaaggcatgcatgaggtttgctccttagtaacacacacacagaaggcagactgactggctcagattttagaaggttcctgatggtacttgggattgaccaggctccccaggactggggacttatctctggctcttatcgctcctgctggatagtggccttgggctcatctctgtcccatcccctgagctacccaactctgggctgcctaactacaggctctccatggtgagggtcccaggatggccctgcttaccttatcctgagcaccattttgtgctcaggtgacaggtttttgtccttctcactccaacccttcttaaatgtactcatgaaacaaattgggttgttgttggggacccctacagagtgggcagctagcccacattcgggtttgggaagcatatattttcccacagcagagttgtagaaaggtgaagccctgataccttgagttccaccccaagtggggtctgaacaggtcctccctgcccactgaacctcctggctattgtgtattaagaaggcttcttgccgcatgtcttctatttgtcgccctccctcgccctctagtggtgccacctgggacctgcagcctgaaaagctggacttcacccagttccatcggaaggtccgccacacacccaagcagcccctgccacacatcgacagagaagggtaaggactggggagtaaggggggggagggaagaggtgctcttacatggagagaaataaggtgtggggagggacagggctctgttccaccacacaggggaggtgaacccatgtcctacatgtcctccctgctcagcccaggactgcaagtgtactggcttttctagagaattcctccatcctccccaccagcccatatgcctgctcctgagcagatacaagtgtctcttgtcaagtaaccgcgctcgtgggtcacctactggggcatctgggaggtttccttgaatacatctcagattcagtaggtgtgaggttcctttccctgaagctgtgcccaacctgtgattggtggacagcatgtggcttcatgccgctaaggatagctatgaatggacgcttgattcaaaagtgcacacttccttaagacactatgaggtgtgtgtgtgtgtgtgtgtgtgtgtgtgtgtgtgtacttgtgtacttggtttcaaggcttcagctgtatagacgactttgtcttgcttcagtgtcagatagttagacatatccggtagagactggacattcacacttcacacgagcccctgggatgctgaatgctgacctgcctgctgatgcaggaactccggtttgggaacccgtcccagtgcagactttactggcctgtctcacccttgttggctctgggaaccagtattacctgccttttaaaaggtgatctcagggcctgagctgccctcaggtcacgtatgtagtactagctgggcacaggcatgagacaggtagccattgctgcttttcagggttttttttttttaagtaattttttacagaagtaaagtttatgcaacataaaatcaaccactttaaactgcgatttgacataacagcgtgtttacagcactctgcaattgctgtttcagtcttcttgctgcccccatacaggatggtcacttccagtcataaccccatgtccagcccctcccctagcccctggcaaccaccaatctgctttctgtttctgtgaatttatttatttatttatttctgggtgttgtggaattggaatcatttgtgtcctttctgtctgttgtctttcctctcagtgcttttaaggtttgatcacaagcatccatggaccattcctttttttagctgagtaatactccttcgctacttgatggagttatggagcagctgagtgatactccatggagcagctgagtgatactccatggagtagctgagtgatactccatggagtagctgagtgatactccatggagtagctgagtgatactccatggagtagctgagtgatactccatggagtagctgagtgttactccatggtgccagctactccatggagtagctgagtgatactccatggtgccagctactccaccattgttgactcattcatccactgctgaagatttgggtccttacctttgggcttttataaaacctactgcttgggacattccatcatgagctggatccacttaggtccctctttatggaattgctcagccatgcgggaactctgggtaactttttcaggagctataaagtgttcccaaagctgaatatcatgtaccatcgctcacacttcttatttttcccatcctcggcctcatttgtttcccactttgggactcagttttactgttatgattttatttgctttctctcctgttcctgctgccggctcccgtctccctgttactctaacactaaacataactgacatggtgggatgtcttactgtatgccatgtgtcctctggcagctgctctgccccttcccgtccatagagaccattcctcttggtggcataagaggctctgagtagggacctggagcagcgatggtctcaccctctttaagggccagaataatgaaagacttaaataaaatacccacacaatgaggtaaaaatgagggactctagaaggtaaatactctaaggagcactatggagatatttcctgggcagctcctgtccctcctatgtgtgtcttctgggagaatgcctggtgacaccagtggggaagctgagacttgggaaatgcaggtgaccatggcactttagactgtaagtggcgaatgggtgtatcttagttagggtttactgctgtgaaagacaccatgaccaaagcaagtcttataaagggcaacatttaattggggctggcttacaggttcagaggttcagtccattatcatcaaggtgggaacatggcagcatccaggcaggcttgctgcaggaggaactgagagttctacatcttcatctgaaggctgctggcagaatactggcttccaggcagctaggatgaggggcttaacgcccatgcccacagtgacacacctactccaacagggccacaccttctaacagtgccactccctgggccgagcatatgcacaccatcacttggtacgtcagcttcactcatacataagagcagccccatcatgagcagattgtgggaggtgctgattaaaggctgcacagggaagattgtcctgtgctcaacaacgctgtcccctctaacgccagaagaccaggtcacccccgttcaccagtgcaggtcctccttctctgactaggctcacccaccaacagaagctggctcaactctaggggtggacaccctggccttggacttaccctaccactcaggatttatgagcagtgccctgtggccaccttgtggctaggacagggaactgccccgcccccccaccccccacttagccttgccatgtgaaagatggactccacgtgtccagccgctgcaacctccctcagaagcaagttgccaaggcttcccacagcctgtgttcccatagagggacagaactggagcgagccgttgccttggcaaccccactggcagcagtgactcagctggtctgcagtcactgtctgcctgccacacctgcagcttagtcggaagtttcaccttggccgggcaggctaggggtcagagctggcctctgtacactgcccactgctgacctcagactgcttaggtgaaagggcaaaggccgggcccatacgtgcttgatggagtctgcagtgggctctgagcccaactccatctggtgagttcagttcccaggcgtattttacccacaggagacctttaagagtggtagcagccattccagtggggccagtttccccagtgccttcttcctaacatctacggcctgtgcatggcatacacacagttggtgctttcccaggccagtggcacacagttggtgctttcccaggccagcccatcactgtcatgcagaatgattcgtccaaagacagctgcatgatccagccaggcctttctctgcctccttaatgtggcccagaacacaatgggtgtagtagtcagcgcctgacctttctttttctcaccttacacctgtcacaccctcctcctgccccatctgctccatctccacctgcctgagcctggaccaccccaggtacctcctcggcatgccctctgcttcaacacatactttgctctctagtgaaatgaagcccaaagcccagcttacagtataactgatttgaactcctggctttactgtgcctcccactcaatggcctgtgactttcttcatcgtcccctcaggctgtcctccctcctgccctctgtccatcacctctacaccaccacgcccctctgggttccacagcgccaccttgtgccctggatggggtactggccacagttctattgggctatttcccatcagttccctgcttgttgaaactaggtgccaggctaggcccccagccccatgtagccgtgtctaatgaaagaaaggtctgatggaggccaagttcagctccttgttttttcccacctaagcctttgctggtttggcctgtcagatttttttcatgtctaggtttacacacacacacacacacacacacacacacacacacacacacactgacacaaccaccagacttttggaattcttgtctcatgctgccctctagtggaactcaagctcatagccctaggggatgagtttccaatttactcttacttaccaagacctctagggctctaaggtgcctgtctggagccacatctggcttgttttccttgacaggaaaccagaagcgatggtagacaaatatttaaacaaatgagaaaatgactctggaatttgagttgaagctagaggtgttgtccttggggagagtcagagatgagaaacgtgcctgagactggggcagcctctgatctaggctctgattggtcccctacctgcccctcagccctgtaacagtgtgataacagtaggactggctgctgcagaagggatatacttaccttgtgctttatgttcttatcattttaatccacgaaccaggttatgatttcaggtacttttattattcctgtcccccaaatgaagcaatggaggtttacagagagagtggtttacagaatcccccgggaagggatgcatctggagttcaaactctggcagtctggtgccagcagctgtacccttaagtgggcaaaagagtgagagctttgggcagtgaactgggccagcatccccagtcagcatgcacacccatccacagagaccctgaatacagcacacacaatatagctgagtggctggcgttgccagcctgaagacaaagaaggagaaggaggctgcgctgggtttctgccatctcctgcctacctgtgtgactttgagatggttgtttggtctctctgttcactgattttttttcccttcggtacaatggggccaaatgagccggcatttttaggaattgtgggggttggggtagtcattcgctgggagcttaacagctgggcctagaagggggtatcagtgggttcatctctcaccccccccttcagatgtgtgttgcaggagggctacaggaatccaccctggagccctttccttgctgaaccatcctctcagaactgttctgtcttttgtggtctaggtgtggaaagggaaagctggaagatggagatggtatcagcctgaatgacattgagaaggtcctcccgacctggcaggtaggtcctcagccttctctgcctgggcaagcctgctggtcccttgctccagccaacgatatactacggcatgggccgtaggaacaggtgggtagaatggggactcaccagggaccagctgtgtcactgacaatgattgggacaacccaccttggtaatacaataagaacattcaaggacctgtctcttgagtgaagggacttgggctggccactactctagcttggaagtttttccccttggccggacaccacagcgggtgagcattctatagcgcactcacatgggtggaggatctatagagtgtctagtgtggcttttgaaaaatgagtttgtcctgccagctccagcacccgctgtgattgcctactctgtccttgactgtgtgtccctttcccagaatgggttcgagctctgagacaaggagggctcgctcagcagagctgatgccaataatttgagacttcagaagagacggtaggaacctaactgttccagagatggcacttaaagccatgctacccagggaagggactggagagtggggctcatctcgctccagaatctcttctctgttttaccttcattcacacactttcccatctcatcctggttttttgtcctctttcctctctgccctgccttgagcctgtcactgcgagaggctggggagttcacagtgtggccccagaacttgagtaagggtgggctggcagggtctctttccccaatctctccctgggtttacagagtttcttaaatctggagtttctgtgtttgccatattttgaaatgtgtgtgtgatgtgtgtgtgtgtgtgtgtgtgtgtgtgctgtgtgtgtatgtgatgtgtgtatgtggtgtgtgtgtgatgtgtgtatgcaatgtgtgtgatgtgtatgtgatgtgtgtgtgatgtgtgtgtccctatgtgtatgtatacagagagatgacaaaaaaaggtttccctcagttgccatctcctttattcttggagactgactgtcctagttggctttctattgctgtgataaacatcatgaccaaatgcaacttgggaaggaaagtttatttcagttaacaattctattatgaaggaagttggagcaggaacctgaaatcttgaactgaagcaaaagccatggaggagtgttgctgactggctggctcctcatagcttgctcagcctgctgcagggatgccaccacccacaatgggctaggccttcccacatcagtcatcagtgaagaaaatgctccttcagacctgctcacaggtcagtctgatggagggagttccttcattgaggatccttttcccccagatggcctgagcttttgtcaaactgataaacacaaacaaacaaacaaaccagccagcctatagaccagcctggactagcctcaactaaaccggctcgtctgcaagccccaggttgcctcccatttctacctcccccaggcgggaccatgcagagccatgcccagctttaacacagattctggagtttgaactctgaccctctggctctcacacaggcactttataaccagccactcccagcctgcacatttggaaactgttcagtgtgtgtatcctcctggtccccagtctgggctttcacatgcctgccagccccacttctcgttccccaggacttgcctgaagtctgctcgttttttaaaggtctttccccttctttctttatctggagtaacttctgctgtcctgtcctcagctcactcatcttttcctgtgatgtttaagcatgttaatcccctctggtgtgttttctctttattagaagttaccccggatctatctcttctgcccttccatctctctcgtgttttagcgtgagacgtaacttccggctgatggttgatgtccttccccacttacctatggctagaaccatcccagcctggtttgttcgtttgttttggtagagtctttccgtgtagcccaggtggcttcaaattcacggtgatcctcctgagtgtgtgccaccacacttggcttacaggttgccaatacatcagagtcaagcaaggaaggagctagggaagtggctcgctgggtgaacaagcctgccacgcaagagttcaacccctggaactcacacaaaggtgaaaggaaagaagcacacatgttctgttgcctgagcacccccacacgcaacatcatatacatgcgtacataacacacatacacacatacacacacatgcacacgcacaaacaaataagtaaattctttttccaaaacaactgcaaaaagcgtgtaaggaacaggatgtcttggtgagagaacagaagtgtcttcccttcacagcctcatcccagaaggacaggtcagcattgctctcccgtatgccaagtgctggctgtacagactgagcctgctgcatcatgggaaggcctgctcagctgcaggaccatacagaggaatccatgatttttaaaacactacaggaaattcctacatacaacacagtcagaaacctcaggtcccagctgattctgaccaacgaggctaagccactgcatgggggatctgcatttcctgtaggtctccctagactgatgctgactctgctctctagacgagagttccaggtcccagagaagcagctctgtagggaatggctgttctgagagtttgttacaaccctcgaagcactgcacagctgagggtgcctgcacaagttgtctgttggggctcccaagtgccagctacgcaggccgtggcattggcgtgtgtagggcttcccagcctggagtcacatgaggccatgcaggatgtctgggactcctagcctcagtcactgagagccaatgactggtacgcagtgaccatcaaacactttcactttcaaattgacccagaaggcgctgtgctcaagtaaagaccatggagaccaccgtataagacgggaactcatctccagcttagggaccccaagccactcttggactctccatggcatgtgttgagataaatgaacaccactagaaatccacgagctcccttccctcttgtctagagccaagaagtagataaagggggttagcctgagctcatttcctacccaccttcctcctcaagagaagacagacgctaacgtccctctagctctcttccccaacagctcctcttcccatagaggcccaagttaccgtccagtctcttgacccagcttacctccccagcctctgtcctgggctcagtctaccctccctgcagtgcagttgggccctgtccccatttgccttgatccttcatttctctttgctttccctctgcctggcatccagtttgtgcttgctctaccttataggccttgccttgctgaggtcacctcccctgtgacaccctctctgagacacagggcaagtccaccctcccagtccctcagacctctctcacccctgcaggatggttcctgccccagtgttccttctcattcgcaagtcagacactgcggggcgtgggggaggagctgtaactatatgtccttcataacccacgctcaggccatgcacaccttcataatacaaccccagtccttcttgagagaatgtcgttgaagaatgcctttctagagccacaactgtggctatctggggttacaaatcatgggagttttatctgttctgtcgtcgagcccattcccttcacccccacacccctccacactgcccccagctaagagcatcctctctcacttcctgctgatgctcttttgggtgtggtttctgggctatggcttgaaggtctttctatcatctcctgtgttaggattttataggccacaacctaatattaaccccccaaatctcagtggctgctcacacagacacaaatattacgctgagggatctaaatgtccccgagttgcctccttggggattcagggatccagtcagactctgtatgtagttttgccaccccaagggtatctaggtagccctggcagaaatagagaaaggggttcatgccctgggtcttaaatatttggtcccagaagaatcgcctggacagagttagtcacatgactccactcaactgtaaagcaatggtggggcaaggggcaggcagtgctgctcagtgtgtgcaggcgcctccaccgatcatcctctctcctcactcaactaaccttctagggcaggttctctgagccagccttttagagagaatggcatttgttcctcaggaagggcatggtcccttcaaggaagcgacaggagtaacaggccgaatgccctgttgttagagctgtaagtgccgaacagacgctggcaccttgcccaggtcacagtccctaagggtaaaagtctgtgtcctctcccaacaggcgccaccttccttcctaagctgctgtactttccaaagccttggggctccagctcagagcagaggaccccagtggccccaggcttaatgactgtggcagttctcctgggaacactggggcagggtgggtgtggcagggtgtgtgtcctcagttggagatcagatttgtcagtggccccccctggtctagcctctgtagacaaagcccagaaccctaccccttggcaatcctacctgggtgtattttcagcaagcagtggaccctagggacaatccctcttagtgccaaccatagaaattcccattgctggggctattgaggcctgtgagcctaggccctcagagatacttgtggccttggagtaagcaggtgtccatgtccagagatcacacctgcatctctaggaatcccagctataagaaagcctccccacccacaaatagcatttagtaagggccaatgtaggtgaggtttggctttgtccttccgtgtgtgtgtgtgtgtgtgtgtgtgtctgtgtgttttctgtggaggccagaggaccacctcaggtgacattcctcaggtactccttctgcttcctttgggacagggtctctcataagcttggggcatgacagctagactggctggccagtgagtcctgggaatcctcatgtctctctcctcaaagctgggattgcatctaacgtggcttctggggggggggggtgtcaaattcaggtcctcccatttgtgaggcaagcatttcacctactgagccaccttagctggtgatgtaagagtcaccaaggtctgtctccctgtggcagcggcaggggaagaagagtcggacactgggctgggtgaaagcccaaggcaggctttacagcacccactagcacctgctgctctgtgtggttcatgcctgccattgctctctaggacctctggtcaagtagaacatcagaaggcaacatgaactcagggtttagtccattctgggtggtgaaaccatagggcaaggcagagcctggggcccacatggctgggcgaatgttggggtcctgggggactttgatgtgctactgtggcactgcattatgaactgaatggcatggtctgcctgccattttcagtgcagtggacgttcagttaccatcatggagggctgcatgctgctactagagggtgttgatgcaccactctgccactagagagtgttaatgcaccactctgccactagagggtgtcagtgtaccattctgccactagagggcgttgatgcatcactctgccactagagggtgtcagtgtaccattctgccactagagggtgttgatgcatcactctgccactagagggtgtcagtgtgccattctgccactagagggtgttgatgcactactctgccactagagggtatcaatgcattattctgccactagagagtgtcagtgtgccaccctgctgtctccttgtctagctgagtgagaagccctggtccccagcagtcaaagatgtctctacaatctctcctccttatcaatgcctggtaatcagattgtcccaaaacggtcctcctcagatctcagatgagagaagtaaaagaccactcaggaccaaacatgctatgctaagatcaccaggaaccctcagatcacatggctgctacccccaggaggacagtaacacaggcaagaggaccgccttccccgggtgcctaagcatgcagggaatgcagcattgatgtgagttcgagaagctggaaaaacatcagcctctctccttggaaggacaaggactgacgaggctccagaatccaggatctgagccctccaagttcaaattcagggaaggaatgaggcctgctcctcttgcacacccctggcctcacctccgtcccattgctaaaggaagtcccagcctgggcattatcacccccaggtgtgatgacttcaggagccgtttcccttcattgctgtgagtctctgccccatcccaccccacctcagccactttagcagctatcatagagaggtaccaagctgacatgctgtccttctgatctctaatcagcccctagggtctccttcacatttccagggcacagagaggagccttgaagtcctaacttcccctttcctcccctcccccatgctcacttctctgatgccttttgtgccttctgtaaaactccaaaaagactgtgttagttgatgcatctgatgccttgcctaagtttttcctatacaagtgtgtgtgtgtgtgtgtgtgtgtgtgtgtgtgtgtgtgttgttgttgttgttgttgttgttgttgttattgtttttttttgagggtttttggtttgttgttgttttggtgttttggagacaaatctcactgtgtagcccaagctgacttcaaacttacactagctcacctccagtgtgctgggatctatagtcacgtgccactgtgcccagctagggatatgttttgtccctgtcccttggattcttcaccaggcagacggcaatgccatctgtgatttgttaggcaacgggagtgacagtacaccttacttcttcgttttgcatctcggctaggacatttgtaaactaagtcctgcgcctgtcaataattattagttggctctgatctctgtggctgagctggattagggaaactgggccaggctcttactgaacggcctgcataactaagtcaaatggaatgtcttgcctcatggatgtgcccaagacactccctgtggtggaccccaaaaatcccaagggacagtaagtagccttttgacctcgggagaatgtgtccgaagcatttattttccacacaagagaacaagaggagacagaagacacagtagagaatagtaatcagggttaagcacgcagattcgtccctcaccacacatcagatgaagactgggtgggggttatacactcacctcaccccctgggaacctgggggcaaaggcaatgtcaaaatgaaaatcatccacccataaaatgataagcaagggttcccttgattcatctaatacttggcaaagtaaaaactggtgctggggcaggagctgcctctgtcctccagcaggtggcactgttaccgtgtgataacagtggagccctctgccctgcctctgataggtatttgcggctggagtggctgtggccaactcttcagccatccagatgggaaagagtgactgtcattccctagggctgtgttgtcgctcttgcccagtcttctggaaacttccgggatctgtgaactcaggcacaggattagtaaaatatcccaaaatgcctaggcacagaagtcacatgaacaccaagcttcgtacaccccagccctgccccccacccccagccctaagcaatgctgcttctggtcacttcacagtcctgtgggaaaagcagtctgacttctttcattccgtgcacgagaactaactggatacctttgatggactgggttcaaatgcagggcctgggtaccttccctgtagatggtgcatagcattctctagtgtccccccgcagtgagagaccactgatgggtgtgtcgcaatgactaacacttgctaacatgcaccaagtgctttctggaagatacctgcctctttaatttttttaaaaatttattggctttaatctttttcatacaatatattttgatcctattcttaaccctctttactcaacttcatattcatattcatattctctctctctccaaaaggaaaaaaaaagttcacaaaaagacatggagtctgttttgtgttggccagccgctcctgggcatacagcctgccctggagtgtggcagatagatccagtgagactcagttggagaaaatggattttcactctcgtggaggtgccaattgctgggagttttgtctagtttgaacctgggcaggtcctatgtattctgtcacagtctctgtgagttctcatgtgcaatagccctgttgtgtctagaagataccgtttccttggctcttacagtcttccttctgcatagttccctggtccttgaagggaggggtttgatgaagacgtcctatttacagctgaggaggtacttctgactgagttcatttttgcagctgtcttctggtccggtgtcgccttctcagtaaggccttttgagctatgccatccctggcctccctgcctctccctctttatccttcctcttggtgtctgccacacacatgctctattgactgtatgcttctcttcattcacccactagttgttagctgcacgtaaacacagccagagggctcacggttggatgtgaatgagccccgaattgctcttgtccccagggtctcacactcactctgtaccttggtccaggacatttatctctacctcataggtgccatgaatagagcctgtatgtcctgtccctgagttctcaaagcagcctagtgacaggttcgctccatgatcattttatggtcttaccttaggattgtcacagcctggcccatttgctaatgtgaggaagaggcagggattctgcaaaccagttttctggctctaggcagcaaaggatgtgcaagttagaagtgagtgccattccttgattggcacagaggacgtggccgtcttttctgtgtggaaatgggtggagaaaataggaggaaaacacctataacagttttaaggaaggggcaaacatcagacaggtttccaaagctccccctccctgctgactgaagacgagtacctacctacgagagccccctcgcctttccattccacccttccctcagagtctcctcaattaggacaaaaaaaaaaaaaaaccaggataaaaataaaggagaccaattcatggcttcctgtctgaggccccaggtagcagggcccatggggaaccatgctagtgagtcgtgcctgttgttattttcacacttgtgagtcttttatagaaacggcagactacttgggagtcgaagacttctggtgctgacaaccaggaagggcccttgggaagaggcaactggcagagcctgaacaggttctcacaggtccttcccttcacactcccatgagaagcagaacacagggagccaggatccaaggtggcactctgatcagaagtgggtagggctggcttctagggggccaaggagcccaccatccttatatgacccacagtaaggccagggcctggcaatcttcagtccacacactaagtctaatcctcttgtccttttgttgttgttgttttgcaagttttattaccctatagcctttgctttctgtttgttcattggctgtgacagcattggtccttgtagagctgtacagccaggtcaccgccctgttgatgccaaacctacagtattttctatccagtcctttagagaagaaggttgcctggaacattaatgggaagaaagccaagacatcccccaccacggagtgtcacacacctcttctaaaatgatcctgtcagggcctccatttcttcagctgcacagtgaggatcatatacctgtgtctggcattgggaaattaggctggagtccaaggtgggagccgcacagagtcggacgggcatttgtaagttgcctttgcaaagtgcttccttaacaggcctggttctgaccagagtgaacacacagggccggcttgacaggcaaggagccattcttggaatagctggggacagaggttctcctggatttctgtggctccctcagactaagttctacaagaatgcctgccgtcagcttactaaaggggctgggagcttctcccaggcacccatatctcccaacaccctgctgactgtcattcctccccaaagctcccctctccttttggaaaccatcctgaataagtcagaccacatctgccctgggagcctccctgggcctcctaaggacttgatgctaggccagttttgagtgtgtctcatgtttcatgactcctggtgtgtttgtgcttcccagaggagggaagccttgaactcggccttggttgtaggggaggggggcggtgtcaggaagaagaggacatggcatcaaggtgaagttggccggtaatggtggagaaaggaggctgtggagagtgggggcggggccttccggaggtggttcctcgagcaccaggatcagttggtgaagggtcaggaccacatggggctcggatgttcttgagtgggatgaaagaaggctttgggaagccatggactggactctgttgagacctcctggaagaagtcactgggaatttctaccgtcatacacagctcccaggttggccattcaggtcaggtcagggtaggaactgtgaatgacagatcttgccaccactggaaaggctatctgctctgtgccctgctttgagccatgcccatagtcctttgatgaattccagaaggttctatcaggcatgagaggatgatcacaaagccagcatggtctagagagcttttgtgagaagtagagtcacaggcctaagggaggccaggctaaacactacctgcttcagggctaatgttatgacaagaacacctgccctcccctgtgctgccctgctggagggtgggtggggcttggtaagaggtggccagcagaggtgccaagcactcattgctgggaacagactatgagttggcccactaggccttacctatggggcacagaggcagtgcatcttctagccaccggtacacgagtctctgctaggagagcatctataacccatggtgggtgggtcaatctcaccatcccctgtggcctcactactcaccttatggcagtttgcaagagctagacacgcacacacgcacacacgcacgcacgcatgcatgcacgaaccactttctggtggatgctactggtggcttgggccagtttgggtaagctaggttgcatgccagtctgctctcacgtctgagacccgccaacggaaggagccctgaagctggggaaggggaaggcgtttggagagtgtgaagtatccattattcccttatgagccaggggcctgcttctggtctccttcctggcagccttaggtttgaaggcggagaagctggttgttttcatttacccaggcttctgtctccaggagcggcagtgggggcggacagggctacgtgctctccagcaggcaggcgtttgtgaatgggccccggctcccaggccagcaccagcgggcggcccccccaggacgcgcagactctcactggcttgatgtcgcttttttctggtgttgcagtagctgggtggaggaagccttcttctggcccaagaacaataccagggtcagcgcagggacctccctcctacaccctcttccttccattgtgagccgctgcacaatcccaggcctctaaggcctgcccagtcagttgggggctggtggtgtcaagtccaggagagttcagcagtgtgtgtgatggtgtggtcacctgagctggggggcttggggaagcatggggccggatcaagcatcttcggatggctaggatgttcctgtgctttgccatgggctgccagcaggatgaagcctgtggatggggcctcttctggctgacccagagagtcagagcacacttcatgcatgtatagagcaaacagggttgccccttcctcgtcactgggatgtacacattaccctaacgtgctccagcccctagctgaacacacactttcctcaactctgcctcgggttctcaaagtggggttctccttcatcagcatcagaattcccctggaaatttacagatttctaactcctgggtttctcttttctctgagtgaactagacgctcaaggttgaacccagctctgtttttacagacttcccaggggaccctcatagatgctggcgttagaacccaggacttctcacatattaaacatgctacaccctattactatatccccagccctcgtacttgtaacatcagaaccaaaaagcaaaacagcaaatgtgagtttgtttggtgggggtggggtggggtggggtgtgtgcagtgttgagacaggatttgggtatatgtagcccaggttggtcttgaagtgttcatattgctgcttcaacttgctggattataaatatgtgccccgtagcaacagctcttaataacttgctgataatttactaagtggttgctataacctaaccctgtctccctccatcagtggctaagattttgattgcttggttgtttttgtttgttttgtgtttgtggggtctttctttcttcctcttcttcatcatcatcatcatcaatttccttaaatgaaggacaaagaatcctgctgtatttgatgacctgggatggagatttgtgaagggttaggggacgcagggaggacccagccccccagtgttctgttattgattgtgttccaaatgactcctaagccttaaagccctggcagagctactagagaccagggcttcccagaggttccttattgtcggcgcagttgaagctcatctcagccgtgcgagcagcagctgggtggagagttggtggcagttggtctatacatggagggaaaccgtgtagctgttctggggagtcccttccttctgctcatgcttcgtatatgcaaatgaaccgtcttccatgtccactggatgaccaccggcagtggaagaagctgttcccaaactcatcgcctgtcagcagaaagtcctgccttcacacaccgagtggcaaacaaaagccaatccgcgagtaaaccagcaaacaaacttctgtctccaaaggaagccatcaggagttgccattaaagaggcctgagctcactgcagaaatcaagtggctggaactgaaactgcccggccttgccctctgagactctgtggtctcacttggtgagcagagggtcttactacagatactcatttcctgtctcctctatccccgccccacctcatttttcataataggctccatcatgcttctgggtccagtttgtcatgagtacatgtgtgcacaaccacacacacacacacacacacacacacacacacacacacacacacacacacacactgtccatagctgaggacttctgaaggaaggacttgtcagatgataaaagcattttatatggttgtgtgttcttcaaagacaaaggttttcccttttggctctaaaaagcttagaagacagctctgtgtagtgcgagtggtgctgcctggttcccacaaacccagacatatgtttctgtcaccgatggaggatctgatgtgccattctgctgcgattcccagaggtccaccagcctggtggggtctggtaaaaggaaaatggcagccacctcatccactgagataagaacggccctgcagcagggctctgaggattcagtgctagatgctcaccaggtccccattgctccgggaaccccagagctgttgtcataagctctatattgagcaatcagtagagcataagccagctttctgccacccatgtggcactgactgatcaggtggcctagcagctcctgtgcctcactgctaaagtgcgcattcaaattaagtgactttgagagctacatccaagttctgtggctccgactggcagttcttcccacctcagagtagtgggtagattctaaagaaggaaggaagaccttgatggccacacttcagcctctaaggctgtggttcccaacctgtgggtctcgacccctttggggaatccaaacctattcacagatgtcacctaaggccatctgaaagcacagatatttacattacaattcataacagtagcaagaatacagttatgaggtagcaaagaaaatagttttatcgttggggtcaccacaacatgaggaactggattaaagggccgcagcattacgaagactgagaaccactactctacagtatatgacccaaagagttgcagccatgtagtcctatttccaacatgctacatggttttgtaaaagttaaataactctaaaaggtgtatgtgttagttttctatcactataacaaaaatacctcataaatcaacttttttaaagcaaagatttattttaactcacagcttaaaacatagtcaactggctccatcgctgtggtaaggaggattgctggaagatgtgtggtgggtcagagccacctcccctctgtgttcttaaatatccctttacctaaacacagccaatggtccaattcaggaggtgaacatcgacagactagatattaatctatagattgtatttgaattttgccagttaacccattcatgccccttatagatgaagtttttatggcatttttttttaaaggagttgggtttttttatctttcgtttgcttggttttgctttgcttttggtttagaacccaatatcatatttggcttttcgttatcgaaaactacacaaagcatatctcttcccttcttccgcgacctcgccattttgcagtgcacagcctagttacttcctagaacgctcatcgctttgggcttgacctgtgattctccatgatcaaacgctcacacactttaaatgaatgccacggaagaggtaccttcaccttcctggtatatcagccaggaagcacagggattgtaggaagtgacgctgagcacctggccaaggcagtgactcccaggactcggcactgtggagtaacattttcccctttgtaattaagtaagtaaggagctatttgaatctgtgtagatacactgtttctgtagtacttttacccaatgaatgaatgaatgaatgaatgaacgaacaaacgaatgatttgtacctaaaacgtcatgctggctagcaaatgattttcctgctttgattttattaactgattttctaccgaaggcaacacctgcccctctcatttatctattcatctatgttggctctgcttttttttaatttgggggattataaatcattgttttgaagcacaagttgtccccaatagtgggagcctcttcaagctggctgccgtgtgtttctgaaatgtcctcatttgtcattgtcttccttccttccttctctgcacaggaggctgacccatcctatctcatgccttctctgccccagtcctagaagctacttctattcacagagatggaggactcattactggatgggttttagaagccaaggctggatatgagttgattatactgtcagggccgatgtggctttgattctctctcctctttcgtatccttcaagtccccctgaagtgaaaactgaattgcctgggtggcgtgtggaggggagtttagggttccatattcagtcatcttaaaacttgcatctactctacttcacgccccacacacccagcccatgaaccccacccctacaaactcagcacatgaaccctgtcccccccccaacaaacccagctcgtgagccccggctcccacaaacccagcctgtgatccctgccttttctggtgccaggtgccttcacgtctcaggtgtccaggttctgccagggtgtcagtcaatactccctctacaggaagccaggcagcacctgccctcactcttccagcttctcctccattcattccgtcctctgaaaattgttacaaatattcttgctctctgtgcttctgtggattttagaacttttctgctagtggatagggaaaagagaacataattgaaagaaatgtacgcagtcaacctgtctgtcatgttcaatacagtctcatttggttggaagctcaagaaagaaatttaagctgggtggtggtggcgcatgcctttaatcccagcactcaggaggcagagacaggtgcatctctgagtttgaggccagcctggtctacagagtgagttccaggaaaaacagggctacccagagaaaccctgtcttaggaagaaagaaagagggaaggagggagggaagaaaagaaggaaggaaggaaggaagaaaagaagaaggaaagggaaggaaggaaaggaaggaaattaaggttctaaagagatatctcagtcagccagccagtcaccttgcaagcatgagaacttgagcttatccacagagagccacagtagaaaacagtcctgtatggtggggtgatctggtgagcccagacagggcaatcttcctggcttacttgccagcccatttaacctactgggcatgttcggtggatagcacctgaggaacatctgaagttgacctcaggtttccctacacaagcacacaactgtgtgagtacacccgacacacatgtacccacacatgtgaacacacacagtcatacccagcacaaggaagggaagtctgaacaggagggcacaagccgtgctcaacaagggcaagtggagcaggtgattgtctgagagtcaggggttgaaatgatctgttttcttaatccagataagaaaactcacctgtggctagagtcccaggcatgttgtcatggggctaaaggataaagggagcagtctaatgtacctgatgaaggccagatgtagggtttggttttttgtttgtttgtttgtttgtttttgcctgttcttcaaaagcttgaggaaaggacacatggacccacagagacacacagatgcactcacgcacgcatgcacacaggaatgcacacaagcacacaacagttttacgaatcagtagaacaacacacaaggcagaatgagagccatcaaccatctgtctgcggtccctgggaagatctaggctatgaccttacaaatgttgagactgaacccaagaactgccaggatacaggtacctagggacccaatgacagtactcttaggattccagccatcccttacctacctttgaacttgacctccttagtagtaagactcctggcagcatgccttgagagtcccgagcactgggttctagtcctaaaacacccctgtcaagggatgaagctctcaactgatgctctctccatactgaacccaggaaatcaccagataggtgttagaggaagtgagcaaactgactgtaaagaatttaggagagcgccgccaccccagaaaagctactctcgcagattcccaggcctggggacatcactagcctcttccacggccacctgggactctccccatcggtgtcactaagaaacatggtccctacccatccccgtgggcggcctggccccagaaggcctcatctaaagtgcaagctgccctgagaaccacatgtgtagaacttctaataactttagtcttcctacttgagagttcctcccatctggaaatgtttaaatgagccaggatacccttaagtcagattggcgatctaccctggaataacacgtcataacctagtgctcggggcagtcacctgagaacttgaggtgctgacagaggactcttaagtagccggaagggcaaggactatgggaatggccctagttcctgaaaatacttcatttccagctagttgcttggaagggtttgacctatgaacgttgtcatctgggatgttggtatgtgagctggaaacgtgttaggctaggttggcctatatggattggagaggaagggctaagggtaggaagtcaaggctgagtacctggacaagctgcagagaacatggagaacttggctaccccagcctggtggccaggcaaaggagcggctgttgctctgccgtgtagtgaagaggtgacatttttttagacgtgcatcctgaagacagtctggccattagcactcttagcacatcatctaaagaaggaaacagggctctaataagtaagggctgtccccaagaccacacagctagtctgcgcacagatttggggcccggggtctctgctccactatgtctctcaaacagcgtaccatttcatttatgattctagatgtatggtcgttgaaaggggctcacaggacatctgtttaataattcattctagaatttctgagggatcgtgatcaagtaggtgcctttgaaaagatttcagcacataaaatgttccgtagagaggaaagcaaggggggaaaaaaaagacagggaaaaaaatctcgctgtcacctctgcaagtttcccctctctccgtgaaccgggtaccgccctgcgcatgagccccaagcgcaaatactaaggggagccgctgacaggcagtccccacccgaaaccagggtctccctgggacccctccttaggtctcatgtgctgagggctcacacagaaggtcagcatggaagacgcagtcataaaaacacttttaagaaatggttcttttctgcattgccgttgcaatgacagcctgcgccgtgagccgttccaagtctctcttgtagcgcttcacgctgtgccgctggggatgctgggaagaaagacatgtggtccctggtcaatatggaaacactgtatatacagttttctttcattaatactcttaacaacctgtgcatgaagttgtcaatgagttcggcttgtggcccagagaccccagctctctcagggttgtgtgaagtttggatgtgcagtgtcctggtcccccttctaagccgatgaagtttgagtcggatatccaagccacttaactcatttttctagaaagctgcatctggagattagggcatgtctggctgagaaggaaaaccttgtcttggaacatatctgccagccaagaaggcagaacacccactattccctcagggtgagggagtcacaagatcataaagatctgtaccgggaaggacccttcagagtcacctagtgccatgctgttctttaaaaaaaaaaaaaaaaaaaatccaggttaactttttattatttaaaaagttgtttttttacttatattttggtcatactgtttcctcccccccccccccaactcctccctgatcctccctacctcctctctctctctctctctctctctttctctctctctctctcaaaatgcaaaacaagaacaagccaaaaacaataaaacaaaacaaaaaaaagtacccacagcaaaacatgtaatctcgtttgttgttgttgttgtttgttgttgttgttgttggcagctactcctgagaatggggcctgctctgaagtaaggctgagctgtctatggcatttcactggaaaaactggtttcccctctcccggcaagcataggttgccaaaggatccttggttagggtgtggctttgtgtccactcccccttcttggtgctggggtatttgtccggattgaactggtgcaggcaggtcttacacatgccgcacgccgtcacagtctctgtgagctcatatgtgcatcagctctgttgtgtctggaagatgctgtttccttagagtccctcctctggctcttgctatctttccagctcctcttctgcaaaaatccctgagcattgggagctgggggaggggtggggtaggtgttgatgaaggcaccccatttagggctggatgctccagtctctcacgctctgcacattgcccagttgtgggccttctgctaattaccatttactgcaagagggaacttctctggtgagggttgagtaaaaacattgatctatgggtctagcaatatgtaaccaggagtcattttattaatatgtttctttaacagggtgatagtagtaagtttccccctagggcccatgatctctctagcctcaggttcttggccagtttagcagaatcagtatcggatatgggtttcattttatgggcctctaaaaagctagttttagacagacaatcagacagacatggttgaccccaaaacatatgtgccactattgcaccaggatatcttgtgggcaagccactatattatgcagggtttaaagctgggtaagactaactgttctttttctcctctggttgtgtacagagtaccttctagccctgtgaatgttagttagtaccagttggatttccatgtctttaataatataactaaatgctatactcagcaataaagccttaaacatcagattgtggggaacaaccaacagctcctttaaaagcatgttatatttgggggatgggatctagggcaccccatccattcgtttttgaagctggaaaaattgaagcccagacagctgctactcggagcccagagcatctgttctccccagtcctgagcagatgaccaatttctggaatctgtggtggatcagaggtcactctgcacttgaagaggcagccagaagtcaaaggagtttagcacagcggagatgtgcaagacaaagaggctgccaggattctgaggttcctgagcgctcagcctggccacagcagttcacctcattcacctgcctcagatgatgtcatcaccttagaagcatattctttttatggaagcctaagtcagattgtgtgcacaagttagcactctaaggttctcttgaaggaattcattacaagatcctgagttgaaagttgtccgtaggaagcaaaaagcttgtgataaagccctgtgccatggcctataaattctacctgacccagctgataacataatggttaagctggccaaaggctgcctgtgtgagggataatggttgctgttctattcatatgacacacacatacagagggggaaggagggagggagagagagagctccccaaccaagatcccatgggtgtgttttacaaacacaccgaaaatgcccggaaagcccattgtggtttttgtaccctccagatcattatttcagcatactcgccaggtcaaatagaaacattcacttggcaagaaaggaaaagatgtccctttctgtggtcctcctgccaacaccaagaggagcattgttctgtcaggctggcgtgtggtgagtcaacccggtgcatccctcccttccacggggtcctttgaggacacccgaagggcagcagccttgggggctggcccacaggtgaggctttccctttcctgaaggaggatggttgaatacaagagccagagaagacaaccccacagagagggacaccggatggtttgaatccccactgtagaaggggttcacatcatagaaaagggatcaagatacaaacttctaaagattccagtactgtgtgtggcttttgtcttgtttggattagtcacacccagctttgagtgacacttgctatttgtctcctttaggaaatcaggctgtgtcagagcaggggctgggtctgatttgtctcttactttctgaaccaggtctttacccacctttgtctctaaatagtcttctcctcacccattcctaggctgcccatcctccatctcctgctgcctccgtcttctaatctctggccatcgtcaaggccacctggtatgcgtttgggtcctgtcctgatcaatctactccatgtgatttacaaagggcacttacccaaccctttggctggtctgttccatcttggccttgcctcccaccccgcatcccccgccacaggaccaatctcccattgtgcatgtcatcccatatccaccccatctctcttgtccagctttggggaccacatctttcctctcttataccctactcaatggccacactggactcctgtgagaccccatctacagctgcaacacatcctaacctggtacctggcacaaggattggcagtggaagacaaaccctagcaaacacatgtgtaagcaactctggtccggcctacaccaccctagggtcccaagggttgaattcggccctaacctgtctcttctaaactgggactcattgacaaactacttagacttcccttttgttgtgttgagaacgggatggcaaaatcttcctgcaagctgctatcactgatagctatcataagaatcaagcaaggtgcctgggagagtctttgaaagcaaccagacacttgtacaatctcagggcttccgtgtgagcatcagtgagttcagggcagctccctggggtctcctgggaaccactcacatccagctctgtgcacgtgcttacaagcagaccaaacacactagtggtaacgtgggcctcttccctctgcatttttataaagtgaatcgggcgaaggaaatgtctaggaatagacagtcttcctcaactcccccaaaataactccagtggaaacaatcgtggtaacattcactctgatgtattgtttccagccttctgcaatatgggaaaagttctcccgtcacttccaactcaactgggaatcaactggacttccagagaggcctggaaacaaaggggactgagcctgagggctgccctggtgtcagggcctgctggtgctagacaatcccaaggctgtgtacacgtttcttcttcctctctccttccctttggggacatgttggcttgacgcctttggattttcccatggataacgtctgggggacattatcagaggcatttattagaactgcacatggttgtttagagcttcctctgactatacagaccagagctctcagtggcaccgtgaccccctacacacacaccaacccagtctgcctgccttcctgccaggcctttgcctacatagtcccgtgcaaactctaggcctgatcaaggccgagcccaccgtccacctccttgctgcctaccgtgctgatctgcccacaccaaaggaacagcagcacctttacgtcagtttccctccactgccctttccctgacctctgaagcatccatggccttccacaggcctgggagacagataagactgaaagctttttcttccctttccttcttccatttactgccccttgcagagcgcccaaaattctccagaactctgttcttatcaccacagcctttcaaaaacaaaaacaaaacaaaacaaaacaaaacaaaaaaaaactcaacttgtcgtgtgtgtaaatgcagtttaacttatgtttaccattataaaagccatgttaaacccttttcctatttcttgttacacacatatacacacatttacgtgcatgctcaacacacatacacgacatacacacatacaccatacacacacacatatacacatgcatacacaaacatatacaccacacacacatgcacacatttatgtgcatgctcgacacacatacatacacacaaacacatataccatatatacacacacatacacacatgcatacacacacatacacacatgtacacatacaccatccatacacaaacatatacacatatgcctacacacacagacatacacacatgcatacacaaacatatacaccacacacacacacacacatagatctagttctttcttgtctctgaagccttccttaattcttctagccacaacctctctgcttctgactctgccactcttcagagtctctgttgtctcccttttctaagaaagcgtccccgactactctgatggaatattgctggaatcttcgcttgtttcagcgtacaggacctatcctccctcatcacatttcccactctggagcacatccacatagcaagtgnnnnnnnnnnnnnnnnnnnnnnnnnnnnnnnnnnnnnnnnnnnnnnnnnnnnnnnnnnnnnnnnnnnnnnnnnnnnnnnnnnnnnnnnnnnnnnnnnnnnnnnnnnnnnnnnnnnnnnnnnnnnnnnnnnnnnnnnnnnnnnnnnnnnnnnnnnnnnnnnnnnnnnnnnnnnnnnnnnnnnnnnnnnnnnnnnnnnnnnnnnnnnnnnnnnnnnnnnnnnnnnnnnnnnnnnnnnnnnnnnnnnnnnnnnnnnnnnnnnnnnnnnnnnnnnnnnnnnnnnnnnnnnnnnnnnnnnnnnnnnnnnnnnnnnnnnnnnnnnnnnnnnnnnnnnnnnnnnnnnnnnnnnnnnnnnnnnnnnnnnnnnnnnnnnnnnnnnnnnnnnnnnnnnnnnnnnnnnnnnnnnnnnnnnnnnnnnnnnnnnnnnnnnnnnnnnnnnnnnnnnnnnnnnnnnnnnnnnnnnnnnnnnnnnnnnnnnnnnnnnnnnnnnnnnnnnnnnnnnnnnnnnnnnnnnnnnnnnnnnnnnnnnnnnnnnnnnnnnnnnnnnnnnnnnnnnnnnnnnnnnnnnnnnnnnnnnnnnnnnnnnnnnnnnnnnnnnnnnnnnnnnnnnnnnnnnnnnnnnnnnnnnnnnnnnnnnnnnnnnnnnnnnnnnnnnnnnnnnnnnnnnnnnnnnnnnnnnnnnnnnnnnnnnnnnnnnnnnnnnnnnnnnnnnnnnnnnnnnnnnnnnnnnnnnnnnnnnnnnnnnnnnnnnnnnnnnnnnnnnnnnnnnnnnnnnnnnnnnnnnnnnnnnnnnnnnnnnnnnnnnnnnnnnnnnnnnnnnnnnnnnnnnnnnnnnnnnnnnnnnnnnnnnnnnnnnnnnnnnnnnnnnnnnnnnnnnnnnnnnnnnnnnnnnnnnnnnnnnnnnnnnnnnnnnnnnnnnnnnnnnnnnnnnnnnnnnnnnnnnnnnnnnnnnnnnnnnnnnnnnnnnnnnnnnnnnnnnnnnnnnnnnnnnnnnnnnnnnnnnnnnnnnnnnnnnnnnnnnnnnnnnnnnnnnnnnnnnnnnnnnnnnnnnnnnnnnnnnnnnnnnnnnnnnnnnnnnnnnnnnnnnnnnnnnnnnnnnnnnnnnnnnnnnnnnnnnnnnnnnnnnnnnnnnnnnnnnnnnnnnnnnnnnnnnnnnnnnnnnnnnnnnnnnnnnnnnnnnnnnnnnnnnnnnnnnnnnnnnnnnnnnnnnnnnnnnnnnnnnnnnnnnnnnnnnnnnnnnnnnnnnnnnnnnnnnnnnnnnnnnnnnnnnnnnnnnnnnnnnnnnnnnnnnnnnnnnnnnnnnnnnnnnnnnnnnnnnnnnnnnnnnnnnnnnnnnnnnnnnnnnnnnnnnnnnnnnnnnnnnnnnnnnnnnnnnnnnnnnnnnnnnnnnnnnnnnnnnnnnnnnnnnnnnnnnnnnnnnnnnnnnnnnnnnnnnnnnnnnnnnnnnnnnnnnnnnnnnnnnnnnnnnnnnnnnnnnnnnnnnnnnnnnnnnnnnnnnnnnnnnnnnnnnnnnnnnnnnnnnnnnnnnnnnnnnnnnnnnnnnnnnnnnnnnnnnnnnnnnnnnnnnnnnnnnnnnnnnnnnnnnnnnnnnnnnnnnnnnnnnnnnnnnnnnnnnnnnnnnnnnnnnnnnnnnnnnnnnnnnnnnnnnnnnnnnnnnnnnnnnnnnnnnnnnnnnnnnnnnnnnnnnnnnnnnnnnnnnnnnnnnnnnnnnnnnnnnnnnnnnnnnnnnnnnnnnnnnnnnnnnnnnnnnnnnnnnnnnnnnnnnnnnnnnnnnnnnnnnnnnnnnnnnnnnnnnnnnnnnnnnnnnnnnnnnnnnnnnnnnnnnnnnnnnnnnnnnnnnnnnnnnnnnnnnnnnnnnnnnnnnnnnnnnnnnnnnnnnnnnnnnnnnnnnnnnnnnnnnggtagagagggaagcccaactgctgtagagagcacttagcttcctagctggtccccagaagtggggccagcagaacctgacctggacccgaactccactttctgccaggctttataaagttttattggaccccagccacccttccctgctgctcttgctataggatgggaaaattgagttgttgtgacagagaccatatggcctgcagagcctaaaatagttagtctctggctttttacaggaaaagtctgccaacccctgctctagagggggaccctgcatagactccccggctgcagtttgcacattgacatggctcatatgctggggaagttttagaccattctctaggctctttataattttttagtggcccttaaggcagagctgatagagagaggaatggtggtcttggagaaccccagtgggctttatgtgagccgccatctgctctgtggcctcccagtagagaattagggggtccccaaatcagaccaacatagactgtggaagttagtagcttgggctggggctgggctctgtacctcccaccgggatgatagaatatggcagaggcaggaccataggactatactgagcagggcctagggatgcagggcagtgccagcagacaccagaaggccaagcttcaatatcctgagcacaagttctcagattctcctttctttcttcttgcgccaccatggtgcccctgaaagtaggtcagatcactgtctgctccagccacacggagggaaatagacaccaagtaggtcacggggctgctactgcctagtaagcctgcgggctcaacccaatggcttccctgacacagatcacccagcaagacccctttcacatgtccgagactccctaatggcccactcccgcatgacaaaaggtcaggcttgctttctgggaaggaacaaatgctgactttctgacatggtcagcgcaccctagtctgaagaaagaaacaatccttatccttaaaatatctggcttcactgaggagttaacacatcgaggcagttgcttaacatcccaaagacatttggcataggacttctggtcaaagcacagctttgtgtagctctgtgttggcgtgcaacactgggttaagacctttacggatcatgtatctttcttcctaactggaaactgtcttaggatccatacttcttaatttgggtaggttccttggttgggggtaggggttgttttgctttgttttggacaaccccctggtcagggaggtccagtattttctcccagcattgactataattcatttagcccactggcatcttaatgtagaagaagagacatgcagtaaacagagggcccagaatagcagccccgtggatgtgtgtttcctgtaccataactgcttccagagtggagacccacagttgcactctattgccactccagaccttggtgaacaccgtcttcatcacttccccattctgtcagctgacaattgctgagcccctgctatgttagttgctgttgggagctcaggtccctcccttgacttctggatgggttcctattgtggtttgcagagtgtggtgactgttcttatgtttgatgctgagctatgggcagatcggctcttgtgtattagaagagttggcaccctggttccatcctttgcttgtatgcctttagcacgtctgcttaataaagcccgtctccttttctacccctgttgggagtggatcatgacagcacccttcccttcagagctattgggaggcttaatttatctcatccatgcaatgcacaatacctcagtgtacagaagtcagtgtgattagcactgtaacagcttggattccgtgcaggcatcccgtttctcctgtctgagtatcttccaggagaaattgctccctcggtaagcagaagggcgggtatttatcaggcatgctgtaggggaaggaaagagctggcaatctagcttcccctcattgtcaaggccactcctctgcacgtgcgactcgacttaaggatgtctgagcacaaggatagctttgttgtctccttgtcttctggccgccctgcagtgacccacaaagtagctattgaaaaagtcaagggacagagcaaacaggttttgtcccgcacgatgaagctgttctttgctctccaactataatctcagctatcagttggaagatttccacagaatgtctatagcattcacctcgtgagtctgtggatagagctaagggttcagacaaggaagctaggacccccggagtctccagagtcctccagttttatctaggctgtaagtcctagctacaattgatctccaccccagccatttcgcgccaataaagaatacaaatccgggacagagagcaagagttctctgcactttataatcagagacaaccaagtggagaccaatgaggggaacaccagttgatgcctgactttcagtcccagtttgagcttgagcactgtgcctttcaccatcaggcctccaatctcactatgccgaacctatgttacttgcacagacacgccagatcaattcttccctttgtggacactgacaccatagtatatttggctttagctccatggacctctggtacccttgggctattctctctatgggcagagttggccaagagcacagcacatcacctgcttccatctctagcaccttacttcttcttcacaatgaagggccagtatcaggttctctattcttaacagaggacaccagctcagagggaggatgcctaaccaggcctgtctgctgctttgcacccaggacttgctcagaaaatggagacatttattataagacagaggacacacggagttgatctgtgggcgtgccctttccccctgcatgccagtgaatggccaccttggtcctcaaaggtcttacggtctgaggataaaggagccagacagccaccatcattcctgtttaacagaagagattgcctttgttaagcacccagctgtatattagaaggttgagagctgatgggaccgtcaaagatctaacttcttacaaagctagaaatagaaatagtgccttgcgtaccatagactgtggatccctggatccctaggttacctgtaagtgttcttagtccctatagacgggacagggataggcccaatctggctcatccagggctatccattgtcttaacttcttttcagaagtagttctgaagatctacagtgtgtaaggccctatgtagacatcatgagcattcacgtaaaggaaacatagccctgaactgctgtatgtttacacatctttgctagggaggtgagtgtgtcagcaattacctagacaattcagaccacggatggagccttaaggagtctgcccagatgctgtgaccacatggactcatgggaattcgagccagctttggagggcaggaacattgtgctaaggggcaaaagctgagcctttgggaaggctggatgcctcaagtaaagaaagagaaacgttttctatggtggagtgactgagaggtgtggaggtccctggagatccctggctggcagtaggttcctcgaaactccactgcagacactgctgcatcctggccccagcccagctcttcttctgctgtgtttccatcaagagagcttgaagtggctctccaggccagcgggatgaaagcggccgctggagctttcctcctgggtggtctgctcctgagataagacccatgaatggtgggggtctgaagaatcacatcctccaagtgaggatgatcacctctccagccggaaaagctgtgtggcagcggggaatgtcagctgtgccatcccagcagcccaccccagtccctctacctgctgtctggtcccatcccttaaaaccagggtgtacgtgctctggccttgcaaatcaagctggaaacactgcatggagagcagaggtcagtggctggatggtgacacctctcctccccaagtccaacctacagagccatcaggagagtgggggaaaaggggagagagaaaggaggaaaaggagggggaggaggaggaggagaagaagaagaagaagaagaagaagaagaagaagaagaagaagaagaagaagaagaagaagaagaagaagaagaagaagaaaagagaaggaatcaggggcacccctgatgaccttgtcaatgagggaaactgtcagcccacgaggggaaggtgacagacaacaggagagtttctactggactgaaatctatcacaagagatagcccagctgcaggatagccctggaagggtttgggactggagcaggactcttttttcatgtggcttgggggagggacaattaaattgtaaggagcaactggcatctcagggttgtatggtcatggatcaatcagtggctacacaaagcagttataatgtgatgagtggtccaagtggtaaggcgataactggggatagaagaattgatgagcaaatgagcggaaaaaaaaaatgccctgtgtgcactaatagcatatgaagaattacttaaagaactgtatccagcactgctcatcttgactaactgccatgagaaaaaaactctttttttttcagtgtgtgtctgaatagatgtgggtacttgattttcataacaagaaagtccaggtcgatggtaaggtccattcctgaggcgagcccaaccagatagcttttctttaggtttgcagtatgagagaaattgcagcttcacagtggcctggagcttagtgaaaatggttactgatcatcaaaatggcttttggaagtcctctgatggttcacagtgcaatgctaatatgtgtgagggtgcaccctgctgcacgagtgtataaagcccatcaaagacctgtgtgctcgttcatccgactctctgtaggtgaatttgagtgaagtagacatgcacttggccaagatgttgtcaagaatgctcttcccacagagccagtcctagaccatggaaaggccatcttcattttgaagctaagtccttcaggatgtccttgggcaaagctgagaccacccattcccagttttcgaagttttttggactataagattttaaatgtcagagactacaaatccagtataaattggaaaaaaaaatattaaagaaacaggtttacatagagtgaagaataagaagagcaagacggatccatttgacactttaaactgttatgttttattttattatgattgtgtgcattgatgtgggtatgcacatatctcacagaacatgtatagcagtgagagccagctcctccttccaccacgggctccaggatggatctcacaccttcaaggcttgaataataagccatctcactggggccctactgatagtttagtctcctcctctttctggtcttgagtaactttcttcagcctcctctggtccatcatgccttcacagctgctcctcagtgcacttcctgtttaaatgatgtcctttgaatgggtgcagcctctgagctgttaatgctcaccccctaccaaagagcggacgtccttagcccgactcactggtgcatctagtgaggattttggtaccttgtgggcctcattcattgcccgagtagatccgaacaccactggttctggatcaaggaactgccttttagtcctctcgtactcccgccgctacctgccagtgccagcactgagcctgtccccgtgggtcctcagtcaagcctagtagaaagctgaaagctgtctcctctataacgctcagcattagaagcatcagaagcagctcgctgtcaaggattctgcactggccatgggtaagtaaggttcatacataccttgggctgaaggttttcctgacccaggtgttctatgtatagttggggcattcttgggccaggaaatcaaagaaccttatagtccagtcttaatcttcataattctctgaggtgggccttcagtacttccccctcgctagctgagggcaacagaaggatgagcgaagtgtttccatccaggtacccatggtaagaggcacagatgaggttaaactagactgttgacccttgacccccattcaggtagccccaaatctgcactggggaagccattgcttcactactcatcatgaacacgctcaaggccaaatcagtccatgctggcttggggccccactgcccttgggtaccccgatgtcatgtgtctcatcccattattcagacctctctccggcggcctctgactagccagctttgacttaccagggcagaaacatgatagccatcatcaggttctttcatgttgagcattagtggtgcatccttccataatggggtacaccttatgctcagcctgtctggtgaggacatagctcaggcaagtgcttctttttgtggggaccctttacctcaggaactctggtgactgctagtttgtatggtaagctacacagtaggctatgctcagaaggagtcaagctgggagcaccctgacctcgttcgttgcttcccccactcgcaacccctcccctacccccatctgtggctataaacaaagatatttggcctcctgggacctgtggatttctttgagagagctaggctctcctgtatctccgcctcacagggcatctcaagcatctatggactggccacctctcttctgtagctgctgctacttctgtccctcaggtggactctgaacctccctggggggggggctcatcccatttttcacaatggcacctgcctctcagagactggcattgtcctctggcagctagagtctgtcttcttgtcctctcctgggcttcccttatgttcttctccagatctgaggttctctctttctgccacagacataccattcagttaggggccaaacctcaggacacctgtacatcagctccacccagagagcactcttaggctgcagaacagaactgtggcagcctatggctctacagttcctgagcccttcctgctttgctgtgtcattgctgtcccttttgatcaaggcatgcttccaggatccttgtggatgctgcatgtcctgaaagtagagggcacctatctgggtcccttcccatgtcggagtcaccagaaccatcctgaacccagatggactgcatcctggaagatacgggactcttagtcttgggctcatcccctaaaggaggtctgaagcctctttggtctttgacccagaatcataggcatcctttcagggccccttcccacacagacaccttctccacactccccagttgcagatagaccctgtcaatcatacttactaatcacttctttgactttccatggtatataatacagaaccaaccttccaccattaaccagatagttcgtggcccctgccctttgcaaggatatctctgcctagtatttgctttatttagaaattaataagtaaaaaaaaaaaaaaaggtcatttgtatctgaattacgcagtgaattgtgctggcatggttgcccctgcgggacagaaaggaaggggtcgttcgtgttttgttaacattgtacggacacaacgaggttagccactacacctaaagttgtgccatgttgaattagtaaaactttttttttggttgtgagtaacagaaagccagttcaaaatattttaaaggtagaaggatcttcaagctcttgactcaaaagagagcttcgtagtcacagcaaaggagagaggaaaggcaagattttcctctgttgtgtaaaaaagacagacaggagctgcatgagtcactgctctgcgatgtctaagcttagcagttgtcaaaaccttggccacctaaaaggtgtgtgcagtatcttatgttggctgtatccttaaggaatgaaagtttgatggcaaagcaggaggaggttcttgtctttggagatctgaataagtcggctttctgtgactataacaaataactcagaagtaaccagcttacgaagagaaaaggtttgtctgggctgacgggtttcgttgttttggtttatgattggactgttctcgtggcttccggttgtggtgaggcagcatagcattgctagcacgactttctcacatgtgtggagtgctttcttcctacttgcagattcggcacagagagggagaaagataacagacctatgggaaaattcggctgtagtgactccagtgaacccatatccatgctcagcgggcatttacctaataaccaggtgtaaaagagaggaagtgtagggtcctactgttcccttcagagccttgtcctcgatgacctatgacctcctcctagactccttcctcttaaaaggttctaccacctcccagttgcatcgagctgtgatcaaaaccagatctagatggtagcagtgtctaaagatgtcttgcatagagaacccagctctagaacgaggccagactgcccgagtgccagttttgctgtgggttcttaccaaggttcagccaggaatgaaataaccacgtgcaatttcaggaagatcccaggctccatgggaaacctgaccagaatatgtcagttacacacctcgtctaaaaaaaaaagtgttctgcgcttactgcggagctgctatgcagtgtgtgtcggtggtgggtggaaaaggttcatgcttcagggtacatgggagggatgagatgacaggagcggctacagagctctgagcagcctctgggtctcatccctccctgcttttatctatgtttttatattgaaactccagctaaggtattgttgttttaaagggtctccactgattagaaaaaataaattatgagaaaattgccaatttaaacatcgcaagcaggccttcccctccatccttctctctgaagcatgtcggtttctctaaatagctgcacagtctagagattccaggaattttagaagcattacctgtttatttctgttgggacgtgacccacacatcctgccagtgtggaggcagaccttgatagggcaacttcttagaagcaatgggaaaacatagctcccagcgggaggaagcctctgtcctcagaggagcagtgctgagatctctctggccctttgagttcccaaaggcttcaaggatcctttggagtgctaacctttgcaacatctctggctagagctagggatggaacccatctgagaagcctggaaatggtagcccatcccccacccccataccccaacagaatgtgccctggctccctgaggctcgtgttccctcctttgcccagaaggcatgggagacctaaagtctatttggctattccatactgagcactcaagccctcccaacatgccactcgagtgtgctgaggagaagttattagcccccatgccagttatagatgttcatggaaggaacagagatatggaggggtgatataatatgtcatgaaccagtagagaaactatggttttctcagtaccaagcacaacaggcagatagatgtatccagatgggcagagagggcttatctggtcaggagttaggcttgggtaatggtttgaatgtgcttggctcggggagtggcactattaggaggtgtggccttgttagagtaagtgtgtcactatgggtgtgggcctttagatgaagatgtagaactctcagctctgcctgcaccatgcctgctcagatgctgccatgctcccaccttgatgataaggactgatcctctgaacctgtaagtcagccccaattaaatgttgtcctttataagacttgctttggtcatggtatctgtttacagcagtaaaaccctaagacaggtaccttccagctcagcacccctgtcactccttctgtctgccctaggatatccagtcttcctttttcagtaccatcatcttcatgacctctctgctccctaatgaatgcatttgtttagtacctggtcctgtgttgtctgggaggaatttaacacatcaggaatgagacttcctagtatatgtgtaacgctttcttaagagctgatatgtagtgagagaaaataataattggccctgagggagtcctggtgggatagctctactggatccacatccacagccaacagccagaagtcaaagatccaggagctgagccttgtactgacggcctgtgattgcagctgtgaagacagatgaggaagaaggaattcaagtttcaggccaccctgagctacatagcaaggccaaccagggaccctatctcaaaataaaaaggagttgggatggacgccagtggtagagcccttgccctgagatcagtacccagtactgaaaattaattaattagttagtttattctaaaagctcatgggaatgcttagaaaagaaatctcccttgagggtcaaacaggcactgcgagccatgaaacaaccagctgctgccttgagctctgtgaaggagacacttctcaacttccccagggcagatgggaaggaggtggtaacaacagccgcagtgcgcacacacacacttgccacatgtgtgcacttgacacacgtgcgaacacacacacacacacctctaaggtgaaagggcaggcaatgatggagtaatatgaactcagaacttcacctttatcagctgactgactagggactagaatacaccgagcctcacaggccctgccttgggccaggcaaggtagagaacagggggatgtggccccagctgagaccagcagttcctctcgtgatgagtatttccaccacctcccctgcagagcccttgtttagtagagcagcctcaattagctcgagcctcagctccctcgttccctcttaccctttctttctcaacaaatatttcaacatcatctaccatgtgtcagacagcgttccatgctacggtcccacagccatcaagacaattttccactgtcctcttgcgatttatgtctgatggtactttctgagaaaactggagtagagatgtgtcatatgcagaagggctccgggtggacggcctcccatctcagtagcccagcctgggatccgccgagctcaggatccctcttccacccagccgactccccatccctccagctggatccctcttccgcccagccgactccccatccctccagctggatgaagcatgtgttctttcatgtttccccagagatttggacccctcctctcccatggtagcagcaggtgagagtggagacctgagcggctactgatgtgataaggctggaaggcctgggcacaacaagcctggcactgcccagtgaggcagcccctcttagaatctatgtgtgagactagtaccagatggactcagctagctggtgatgttgtaggagcagatgtggagaagctgtcagacaggcccaggggcgtggagaagtgccaggggcttcggtgtgagatttgcatgggggtttaggggcatgggtgtgaattttccagagctgccaggacaagcaaccaaggctgagaagcatggtctcatagaaccatcaagatgtctgcgctctaggggagtatctttccttgcctcttcccagctccctggcctgccttggtttgtagctgcctctctgaagacattgcctccatcttcccctgacttcctccctctgtctaacgtctctgtgtccaaagtcttttcttttaaggacactagttgtgggttacagacccaacctaatcccatgtggcctcatcctaacccgagtgcttctgtaaagactgtttccaaataaggtcacatctgtgggtactcgggataaagattccaataaatgttttgagggacacagttctgcccaatgtaggttgaagtctatacagaccctgtcaagttcaggttcaccccttggtggcatcttcctctgaactacatgcattagcttccttacctgtgtgcacttagtctgtctaggaccaggaattgcttttgttcaacctgcttttctctacctgtctttgtttgggtttctgttgctatgaagagacaatatgaccaggacaactcttataaaggacaacatttaattggggctggcttactagttctgaggtccagtccattatcagcattgtaggaagcgtggaagcattcaatagtcatacctgctggagaagctgagagttctgtatcttgatccaaaggcaaataggagaaaactgacttccagcatctaggaggagggtctcaaagcctacccccacagtgacatactttcttcaacaagaccacacctactccaacaagaccacacctactccaacaagaccacacctactccaacaagaccacacctactccaacaaggccacacctactccaacaagaccacacctactccaacaaggccacacctcctagtagtgccactctctgggccaagcacattcaaaccaccacagacaggtgggtgggtggatggatggatgatgggtggatggatgggtggtggatgagtgggtggatgggtggctgggtgatgagtgggtagatgggtgcatggatagatgtatggatgagtgggtagttgatgggtaggtggtggatggatggataagtggatggtggttggatgggtagnnnnnnnnnnnnnnnnnnnnnnnnnnnnnnnnnnnnnnnnnnnnnnnnnnnnnnnnnnnnnnnnnnnnnnnnnnnnnnnnnnnnnnnnnnnnnnnnnnnnnnnnnnnnnnnnnnnnnnnnnnnnnnnnnnnnnnnnnnnnnnnnnnnnnnnnnnnnnnnnnnnnnnnnnnnnnnnnnnnnnnnnnnnnnnnnnnnnnnnnnnnnnnnnnnnnnnnnnnnnnnnnnnnnnnnnnnnnnnnnnnnnnnnnnnnnnnnnnnnnnnnnnnnnnnnnnnnnnnnnnnnnnnnnnnnnnnnnnnnnnnnnnnnnnnnnnnnnnnnnnnnnnnnnnnnnnnnnnnnnnnnnnnnnnnnnnnnnnnnnnnnnnnnnnnnnnnnnnnnnnnnnnnnnnnnnnnnnnnnnnnnnnnnnnnnnnnnnnnnnnnnnnnnnnnnnnnnnnnnnatgtgtgcatgtgtctcatatgcactctcctagcagtgggtagacagggattctctgccctccctccctccttccctccacctctctccacccctccctccacaggaagctccatttctgtgagctgcttgtctctgaggccccacacaggtcaaggtccccgaggtcatgggttagacattaggggacagtatccaagtctccgagccaaagggagaatggtctcctggagaagagttgaggaagggtggtacttaatggtagtctaggtccagggtgataccttagaggcacagtcacagccatctggctgtatgtgagacctgctggagacctgctaagaaaggtgtagcaccaagcccatgggtactctcaaggatgctctggcagcctggtgggggctccttctctaccaggagatcttttctgaaaagtaggggcatctctgctctgaagccagaacgaccctctgccctgagcaaccatcagaacaacaaccagtgctcctcaggctccttaactggtcacttctgtccttgggcactctatctaggacatgccactctcccaggctcatctcagtggtcgcagttcaggtcagctgttctcagagatgaaatggctgagggagacttttcatgggggattggacgatcgcctcctacagtcctgggtatgagcaaaagggcaacttcccactgctgctgcctgtgttgggggagaggccgggggacgcattagattccagaactctgaggtggggctgaagagactggcacctcctggctcatgctatgccaagcactgtgggcagctccatctgtcagcccagagctgagatcctggtctgctgccagctcaggactagcttgggagggagtctcagcttcctggccattgtctattgggagcacacccagtgtgttcctacagtgacctggagaggcctagagtgaggtgggagagacagggggagggagggagacatcgagggagggagagagggagagagaaggggaaagagcccggccagaacctggtcagggtgggagacaggaagtgagagaggaagactcggtgtttttccttatttgtgttttatatgaaagaaaacaaataatatcctttgaaaaaaacccattaaacaaagcatatcctgagggtcccagaggcccattgtggctgcctggagcctggaatccattcacacggtttttggctagattgttggaggctagaaagaccggagagggagggaaggaccatcattaaaatagttcaaaatggcttttgctccctggacttaacagaagtctgtgccaaataaccatagctccaagatcccgggtctgcctggttcagtgtcctcccatcacctctctgggaagctccatcaaactggccagtctgagtgtagtcaggggcaccagtgtcttccacctggccctgtgaaggaagactaaagaaaactctccctgaagagtcccagtgaagggagctgaagcccatagaactgccatctctctcttactgattggcctctctgggccttgatcttcctgtctaccaagtggggctctcaggtatcccaggccccaggctggaaccctccccctagacatccaagatacccctagatcccaccactgcactccagctgcccaggatggagtgacagtgttcctggtcatattctcctcgtggacacatttgcatgtccatcgtgcagaacagcttctgtgaataatcctacatgagcatttggtaagattggcattacaaggaggtctctccccaacctggatgtaagcctgtaatccttataatcgtaaagactgtgtgcaaaaccacccttagaattttccccggggccctcctttgaagcctagaagacaatcaactcttcgcatattttccctaaatgcttccaaggtaaaggaactgcttgggggatttggccctaggattcggagccagtttgtgctcaaggcttgggcttggcacactcatcaccattcttctcaatggcctatgctagaaggtgatgacatgcctagctggagactggaaaaggaacctgtccccttcctgcagcaattggttatgtacctgaccctctggatgaccagggaacactcagctctctggcttaggactctacaggaagggccccctggttgattttcatggaatcagcccttaaagagttcctaaagagaaggatgggaaggtattggtggccttggctctgctgcctttctctgcaaaaccttgaactacacattcaaccttagcatgaacaaaacctatttgagagcttgaacattaagagtccagactcttaagcatcctcccttggtagggattcatttgtattaatgatttccattttctggtgtgatttaatggtcagaatctggcctcccatgtcctttactgagttactgagtgttatcactggaaatgtggtgttgggacacacttggctctttacccaaagtgattcacgtcctctctttctccgtgccacagggctaccatccgatgccccacgaagcagagattgcacataccaagaagttgttccgaaggaggagaaatgaccgaaggtaagaaagacttgtgactgctgtcaccttttcctgggccggctgctgggcacgttagctctggtctatgctgtgacgcgacttaatacctgaggatgagttgctcgcctttgaggtgatgttgcaagtacaatgggctgggcttggatctgcatatctgtgctgggcccagggactgggtccctttggaagacccgcagagggccactgtctccattccttcctgggagtgagcattgctccagatttacagacatgctctctttccataaaccaaagctgcagcaagctcaaggaccagggccctcgggctgcgtgtttagaggcatggcctccaggaggctccccaacctcacaaatccaaaggcttccttggtctgtttctccatcattaggaattgtcctgtgtattagccacactttgcagtgaccctcacggtccagagtagtaaccaggggacgggaaaaacatgatgaggtggcttcgtgtcagagcaagcaactaagatcgagcatccaagacatgcatgtgtgcggtctacaaggctttcttatatggaaaggtcttcttgatgtagttcaaatgaaaaattccaggtgcagaatcatactgtgcgcagccatttgtgctaaagggggagtgggatctttttcttttttcttttttcttttttttttttttcttgcttgaatgtgcaaaaaatatttcaggatggaaatctttaaaaagaaagaataaaaaggcttatgcccaaggaatttaaatgaggtgtttccctgtagggagtttattcttagacaaaggtgatggcttgtggctttacctttagtaaaccgagtatgttctttaagaaacgagaaacagccagctgccttccttcactcggaaccctaggagcacctcccctgggtcctgcatggcctcagctggagctgctgggcttcggctaacccggggctctgacccttcactctggatggaaatcccaaactggaatatagtaggttggcagaagacagatacccagaatgcctgtcacccagtagtagattttctacttctgaaaacgtacacaggggaaatgagtgtccaggtatctgggaggcagtctgtcctgattgaggactgggaatcaacaggcatcagaagaggaaactgagttgggagagctgggccaacccccgcccccgcccctactcctgcccctgcccctgcccccgcccccgcccccgcccccgcccctacccctgccctgccggagcacagttggttgcctgctctgtgactcctctctgctgttacatagaaccgttcttgggttctgggttctgagtcaaggaaagaaatggggaacagccctcaaaggagaactgttgttcacaaggggccaggaaggtgtcagagagagcagaagaggcttgccatccttcctccccagtgtgcgcctcagagatgccaagactctccgagctcactgatgagaaggcgtctctgggccaagcactggcatccaggacagcccacatgtccacttttgagccaggtcaccacgctccacaggagtcgcctagacgggacaggcctccggaaaaacggtgtgacccgggagggagtgtgcatggcatggggagggccaggaagctgtaggggatgctctgcgtaggccaatgcacctcacaaaggatgtggaccgggccggcgtccaaagagaagcaataaagttgattaaagggacagaacgtatgtcctgtgagggggcctggagggctgggtagagaaaagagcatccacatggcaagacccatgaaagatttacgtggaagcaccggcggcagctgcccgtgtttacatggagggaacgtcttggccaccagagtcagactgcagctcagggtagcagacacacacagctgaagtatgtgctagacgaggaaccagtcagaaatataacacggcctgtttatcacttgggggggggggagtgtcctgctatagagcacccatatggtagattattttcaggagagagcaggtaacaatgtagctgaaaggctttattctataaaagctggggaattcctgagtctttcttgggaacagtggtgattcaggcattcacagacaggctaactgtgaattgccaagtcaaccccagctctcccagctgatggccctccatagtggcctcgttaggtaccaaacctgtgtgcttgacactagccttgttagcattgaaagcataagccacactgagaaggtgtcacagggagaggacgagaacctaggtaccgatggtaacctaggaacacagccagcatccacgtaataccccagatcttaccgtgtgtcatgagaagggaagtggcaagccacatcctgctggggtccccgtgactcaaccttggaacgcctgcaggagtcgttggccttctgtctccctacagagtgactggaattgggtccgatagctacaaacgccatgacaaactgctgtgcctagaactgagtggtaccttccggccagaataggcattctcaaacctgggacctagcatcctcctctgcacagcagtctgccacctgtcctaatcctgtatagcgctctaggcgtctctgtgtgcctcgtctctgcacttctctcccctggttcaatttggatgtactagatagctgacctatgtaggcatgagccttggaaataggggctgggtagggtgagttgcttcattttttaagggtgtgtacatgtgtgtacatgtgtgtgtacacatatgtgctggttcctataaaggccagagcgtcagctccccctggagccagagttacagacgatggtgagtctcccaccatgggttctgggaactgaactccaggtcctctgtaactgccgtcagtgctcttaactgctgagccatctctctatcctgccccccacccaaggtacacagttcttgaaaactgtgttttctttctttcatagtttgtgtccaatccttgagaggtttgcacaggctcattcttataaagcactgagtggtctttgcagcagggtgctctccgggtcaggggagctgtaaagggcacagagagcgtgtttctcattactgtctttcgaagtctaaccacataatcgtggcgtcccccaacccaggacagtgacggtcggtaggcagagcccctgtgaaggagcaacctaagcaggcactctgatgaaatctaacttgtggctggttttcccttattttgcaaaaggaattaaccacaaggacagcttacaggttttctccttacaaattttctcaaaatttggacaactcataactacctgcttattttggggggaggggagctaataaaatgtgacagatgtcagataaaatcatgcatttggggattaaaatatgcagtaagtgaatattctatgcatccctagtagtaacctggttttgcaccctccatcactgccaggtagaaaatggagagttgagaaggttcccctaaagctctctgcccagccccagcatcaaggaggaagaaattcactgaggggctgaggactgggctcatagagtctgtttaattcagtgagtgtccttatccctgtgggagggggaggagttgtgcaacgctcctcccacccctacccttgctcccctcacccctgctctgttttaagagatgaacattatcactgcagtgagcaaacactgcatgccacagtatctacagcctgaggagcagaccccaggatgagggcaagcttgggagggcatgctgtggaaggggcaagaggcagcaggctcaggcagagaagctgagcgcaagggtgtcattcccatccacccaaaaggtgggaccattctcaggagacaggcatcatttaattgggcaggggggcggggggacaaaggttatttaaactttagggagtgagtaggggtctttggggaaaacgtatatcattgactagagccagcatgctggagatacctcatttgcctaaggagacctttctaggtgctgctgggcatgacattttaaggagaaaggaaatttaacctgggcgcaacatgcaggcccagcatgttgcagggcagtggggggggaggggagcagtaaccctactcttgctcatgtccaggctttggacatgccttgaccccacctttgctccaggtgttccccccaaggctgcacagctttatcagggcagacttggtgacatgttctgaccctacggggagttctgaagtttgagggacttctgagacttgacctaagatgcagagactatgaagaacttgatgtaccgtgtcccttgattgtccgaaaggggtgtggtctgaggatgagcaggatcagggccttttccatgggggcagcagaagggtgagccctgtttctgaaagggaggtaggcagtacatttagctccccacagttaagtgctgttaaaccccttgtcttattttacctttctttgctgtgacaaaacatcatgaccaatgcaacttataaaaagagtttattaggaccttatagtttcagcgagtgaatccataaccgccatggtagggatcatggtaacaggcagcaggcatacatggtgctagagcagtaactgagaccgtagatctggatccataatcacaaagcagagagaaagctatttatttggaaccctgaaaacctgcttctagtgacaccgttcttaatctttctcaagcatttccaagtactcaaatatatgaacctatgggggggcctttctcattcaaactaccacacctccgattagaattgttctccgtgttattgtgtctgtgatctggagaatacaaggacctaaggtggagctgccacagtgacattctggctgcagaattaaccagagtgttgtatgtgcctgtgcagcatccaagtttgtgggttcagagaagagggcatcatgggatgttggggtgaggggggagattctagaacactcccttttttggagtaatggttcaactactagtgaaactccagaagactttgaaagagagacggagcgagagggagaagaaaagccacagctaggcaaatgatgcaccagggattcccccagaagtcaccctagaaacagaggcaaacatggggctcagaagcccccactatgagaagacactgtgcttgctttgaatatccccctgcctaggttgtcaggagtctcagaagaccccacagactccaaagcccagcctgccagtacttcaagtagggagattaatagacacgacatggccacgggcttttgagtgatgcccacctgtgctgtcaggagtgaggagagcccttcaagtgaacttgcttcgttaagtgaggtcccggaatggttaatgtactccatgtgcagagcagatgggcaggaagaagtgaagaatcccttggccatcctggccagcgtcagatggctccactgcacgagaagccgcaagcgagccatccccctggggtgcagagtcgggctacatgctggatgctgcagggcggccatagtgtctatcctacagctgaccgtgactgtggcttggtgtcctcaaactgtggcagcagttaagaatctaatctctccccccgcttcctctgcctgcacaaactcagatcccaggcatcagccatcggctttgattttgcaagctccttgtaaacactgtgtgtcactgataaaaataaacagggcaagtggaattggaggccgttagtataatatacttacagatacactaaaaacactgattctgcgcttcacagggttgcctttttatttgtaattttatttatttacatttcaaatgttattctcgttcccagtttcccctctgcaaacccccctatcccatcctccctccccctgcttttatgagggtgctcccccacccattccctcctcagtgccctggcattcccctacactggggcattgagccttcacagaaccaagggcctgccctcccattgatgttcaacaaggccatcctctgctacatatgcagctggagccatgggtcgctccatgtgtactctttggttggtggttgtactgcctggttttgtgtgtcaacttgacacaagctggagttatcacagagaaaccatatccaaccataaggcattttctcaattagtgatcaagggtgggagggcccattgtgggtggtgccatccctgggccagtagtcctgggttctataagaaagcaagctgagcaagccagaggaaacaatccagtaagtaacatccctccatggcctccacatcagctcctgcttcctgacctgcttgagttccaatcctgacttcctttggtgatgaacagcaacatggaagtgtaaccctttcctccccaacttgcttcttggtaatgatgtttgtacaggaatagacaccctgactaagatggtggtttagtctctgggagctctggggagtctggttgttgatattgttgttcttcctatggagttgcaaaccccttcagctccttcagtccttccccttactcttcccttgaggaccccatactcagtccgatggttggctgtgagcatacgcatctgtattggtcaggctctggcagggcctctcaggagacagctgtatcaggctcctgtcagcaagcatttcttgacatcagcaatagtagtgtccggatttggtggctgcatatgggatggatccccaggtggggtgtctctggatagtctttccttcagtcactgttccattctttatccctgttatttcctttagacaagagcagttctgggttaaaattttggagatgagtgtgtggccccacccttcaactggaggtcatacctaacttctggatatggactctacaggttctttctcccctttgttgggcattccagctaatgtcatccctgttggatcctgggagcctctttctttcctggcatctggcatttttggtggctacccccagttccccattccccattgttacacacctctgttcaatttcctgaccctctgtacatctcctccatctcctcccatacctcatcctgtgcccctttttcccccctctccctcttttcttcctcccaagtccctcccaccctctacctcccatggtcattttgtgcccccttctaggtaggactgaaacatccacactttggtcttccttcttcttgagcttcatatggtctgtgagttgtatcatgggtattccaagctttttgtctaagatccacttatcagtgagtacataccacatgtgttcttttgagtctaggttacctcactcaggatggtattttcaagttccatacatttgcctgtgaatttcatgaaatcattatttttaatagctgagtagtactccattatgtaaatggaccacattttctgtatccgttcctctgctgagggacatctgggttctttccagcttctggctattataaataaggctgcatgaacataggggcacatgtgttcttattacatattggaccatcttctgggtatatgcccaggagtggtatagctgggtcctcaggtccaatttcctatgtccaatttttctgaggaaccaccaaactgatttccagagtggttgtaccagcttgcaatcccaccagcaatggaggagtgttcctctttctccacatccttgccagcaactgctgtcacctgagttttttatcttagccattctgactggtgtgaggtggaatctcagggttgttttgatttgcatttccctgatgattaaggatgttgaacatttctttaggtgcttcttggccattcggtattcctcagttgagaatttgttgtttagctctgtactgcatttttttttttaactaatgagttatgtgtcacttaaaaaaaacacaattttgagacagagtttcattgtgtagaatttttgaactataattctctgccccagtttttactagtatcaggattataggcatgcactactagattcatttctgaaaaaaacaagtagtgagatttctttgttgtttgtttcttaagtcgtctcagggttctagtttggttttatgattagagaaagtccaaggattgagtgatgggaaaggccccttgtaaccatctttggatcttgatgtctgtagtgttccgtgaatgtgccaggaaagtgaccctttcaaaaaaggacacagatttggtctggttatgatttaacctatgaagctatgctaggaataaataatcacttgttttcttctaaaccatctatatttgcaaatctcctttaatttttgaaatttagaactgtatgcttgtagcttcaacctttccccattttctatcagaattagctcttgtgatcatggagggcagaacgtcacaggctaccacaagctatgtcagaagccagcggtatgattcagtctcaggtccaaaaggcaagaaccaagtctgaggccgggagaatgtcttaagaatgtctgtcttaagaagtcagcaagccagttcagctttcttttgaaccatgcccctcccctgatgggttgagagacgcccatgtacactgataagggtggagctccttgactgagcacagtgattcaagtgtgatcaagagtgattcaagtgtgatgactctaggaacccctggttgcctgtctgcaagtctcagcagctttctggagcttgtgtttcccatgagttctaagcatttctccatccatcaggagactctttacaaaggggtttgtcttccaggaactgatcagggactgactagtccagccctttgtctttctatcagctcattcacataaattgctcagctaatcctcttagacatacagacagtgttcattatccacggattccatagtgcaagcatgcctacttgttaaaacttacagtaacatgaaaatctctgatgttttgagactccatcattggcaggcatggaatagtaggtagtttgagtcacatgccacacaggatcccaacatcacacaacgcaccatcctatcatccttattttgtctctgatcctgatcaaggtttgtcttagggccgagtttttcactcttgtgtgcttttgctagtgattttgccgtctgtgtggctcttgagtaaagagtgggaggtttatgtactgaccctaagttcaagttccttgttggaatagaaaaggaaattgtgggcagcgtgatcacagatctgtttcatcatctccaggattttaagttcaagaaaactgtgatgtgccttacagagagaccaagcatttaaaaatcttcatgccagcaggccttggtcctgcaatgagttcaacgttagctggtctataacatatagtaagtaaacagtctataggcggctgaagagatggctaagaatactgccagcttttccggagatatggattcaattcccaatacctacatggtggcttaccaccaccctgtagctccaacccctgggaatcttgagtccctcttctggcttccccaggcagagcatacatgagttgcacagacagatatgcaggcaaagcgcctatacacatggaaataaataaaatataaaaataagtaagcagtctataaacagaagcacacatataaaaagagattgtacttgatgagtcggtgaaaaatgtaaacagaggggctgtagtaactcagtgtttgctaattccttgttcccggtgacactctggaaagtcgccttctgagcaacaaggatgagccgtgcttgctctttaaaacagggtagagagctactgaaggtggagggatgtgtggggagccatgggacttcaggcatgttcacacatgggtagtgatagggcagggaggacaggagtgggcacttcctaccccggctggctgtcactggcttggtttccactgcttcatctgtgccatcctggggtgacgccatcaccaaagacagctcagccccatagtgactgtcactgccatcctcttgtcaggagctggggggaccgtgaggcagatccacgctcacattgcccacggtttctctttctctctcagcaaggaaattgccctcattaagtccctgctaaagatagataagaaaatgggccaggcagacccccgcctggcaggcagccctgtcagattgggagcaaaatgagtcaaataggaattatttttaggatgtctcctcctccccgcacgcccacccccaggcgggctctcttggaaagaagagcagctcattgcttcaagccacatgtccgggtcctctcagtccttgttagattgaaggggagcccccagaacaagccgtgacatgtcacaccatcctctgtagagtgcagatgcttcacccgtgttcctggtcctcgagaaggctgggcacacccccctgtgagtgatgtggctcctggatcccttttctaccgctctcctttggggtgtacgctccaagctcaggccccactcccagcttcacgctttatgagattacagaccccgtgggggaccctctcctatagaggaaccagtgtgtccctaactcagaacttacaaccatataggggccaaacagacacaagaggtggccttccatacatttgacaggttctctgggtaaatgagcagtgcccatctcccagaactgtgtccacaactgtataactgggcgttcttttttttttcccccatcattcttaccccctttgtccagctgtctgagttcattcagaccttgcaagttctaaagagcaaagtagggatattcaagatcaagaaaggtaactaaggaaggggtaggggacatgccttgtgacctggggacaggagggctattgacgaggaaactagccatagactgatgcagttccaggtgtttgtggctgggacagggcacagaggagcctaggagccagccacccagttgcttcagcttctccacctcagatgtcctagccgttcattctctgcaggagtgggcatttatgcattggctcacaagcaccagctccaactcttcctcctccacacaggctcaaataaccaagctctggtcaaccaatcatctgagtgtcccatagaggacagtgggcatggtgatagccaagcccttggcctggctcacttgattttaggtccagctcatctttcaccaaacaggggtctttgagggtgttgcggagggggagacattcactgaatttattcttcttgttctcagggtcagggatgctattaggttatatgttgaggcaggtgcttaggaagaccaagtaataactggaccctcagaaaacatgagttccgggctggagaggtggctcagcggttagagcactgactgctcttccagaggtcctgagttcaattcccagcaactatggggtggcttacaaccatctgtaatggaatctggtgccctcttctggtggcagctacagtgcactcatatacagaaaacataagatcctcttcctcctaccatttactctgtgaacccttcacagtgtggagggaaaagatgctggaccaagagccctggagtctggtccaggggcgtttgcctttaggagccgagttctgctgctgtgaagtgggactgtgattctagctatcacaggtattgcagagctcatgctacagataaaaacagtgtctctcctgatctattcattcaccataggaagacagaactgagaacattatggaagctagcccaggccctcaggaaaaaaaaaatctttccagaaagttctagacaagctgaacatgtctctgacccccctgcatatgtctttcctgtctgtatgtctttcctgtctgtatctagtccagatctgtatgccggcaccccaccaacctgagctatgctgccatgttctttgcatctggctcagacaccacagaggggcatcttatttacagaggcgccaggctgcacatctgcaggttctaagggggtggcaggctctgggttcacaggttctaaaggaataccaggctgtagatttactagttctgaaggtgtacaagacggcagactgggaagatgtaccagtctggaggtcactggtactgagggagtagtaggctgttcttctatgggtccttcggctggatcctgagatatgcctgacccaccctcagcccaggtcagaagtcactcagcaactccatgagcagttccaaggctcgctatattaagagcactgttttgagccttaaacaaatattagttcgtatactctcctcgacatcccaaggaagggcatgctatttttatttccattttgcagatgaagaaaatatcatgtagagaaaaataaagcggctaggaggcctggcttcagagcctgtggttctcatcggagctctgaggtgaatcttcccttcactcccttcctcctgtcctgagaccctcgatgccttcggcatagacccaataaactcgtagtcaccggccgttcaagactccagggtcttgtcaggatagggcttctgtttttcaaatggacagagagaagggctgctctgcctcatgccaaaggagggatgaatgaaaagacctcagccaaacccaccagacagtctactcggccacagcactaggccagccctgccctccccctaccgagcaaatctatgagtgagcatatgttggaagttcctgcagtggaccacagatttttccaggttacagcccaacctagtaagaggcccaagagaggatcacataagttacagggaaatgggtatccccgaagagatggcttcatctagctgccctctgcttctaattaggaggcccaaaccaaggcataagggtacgttgcacacacacacacacacacacacacacactgccaaggctccgtagcagtgaccagggcacaggttttaaaaataccaaggagccttcctgcctgggtcagcatttaccctgtgctctgggagttatttctgaatcttcccagtaacttaattttagccactttattccaatgcatgtgttttagggatgccaaggtagcctctgttacggtttggagtattttgggagggcctggtttccagaagtgatgcaggggctcaattaggcaagacaccagcaaacagaaataacgtaactcaggaaaacaggtccctggaggtgacgcctctgtgttgctcacatgggagaagccaggggaaagggtcagcagggtgccacaagtggctgctcaggctctctccactctatgcacctacagagatctacctctgagcatgagcagaatgaagctacccaggttttccaagtaggcccagatagacacaaaatggcccaacaccagagtagttaaacccaagtcaatggtaggctccatagacccaccttataagtgctccatagaccctcttataagtggtgagacacccaagttcaccaggcatccatgggaagtttaaacatcctcactgctggtacatcaataatgagatgtttttggaagaatcactaaagagttcatcactttcccctccagtactagggactgatcccaaggcttcccacgagctagccaagtgctttgacactgagctacatcctcagccctcttctcactgggcagggtttcactaagttgtctgggcttgctcactctgcaccccaagcaggccttgcgttatgagcattgtactggctagttttgtgtcaacttgacacagctggggttatcacagagaaaggagcttcagttgaggaaatgcctccatgagatccaactctaaggcattttctcaattagtgatcaagggggaaaggccccttgtgggtgggaccatctctgggctggtagtcttgggttctataagagagcaggctgagcaagccagaggaggcaagccagtaaagaacatccctccatggcctctgcatcagctcctgcttcctgacctgcttgagttccagtcctgacttccttggtgatgaacagcagtatggaagtgtaagccaaataaaccctttcctccccaacttgcttcttggtcatgatgtttgtgcaggaatagaaaccctgacttagacaagcatcctcagaagttttgggttttgttttttgttttttgtttttatatagtagaattataggcccggcttgttcataagctttcgactaagccttcagaagccctctcttacaagagccccagggcctgctccatctacctgctgcatctctccctgccgatccttggctctccttgcctgccttctcacctcctgtctttactcaccaggccccaatcttctcttagttcctttagtaggcctgtgctagctgaacccttcctgggactcctctccccaggtgtcttagtgagggttttactgctgtgaacagacaccatgaccaagacaactcttataaggacaacatttaattggggctggcttacaggttcagaggttcagtccatgatcatcaaggtgggagtatggcaacatccaggcaggtatggtataggaggagctgagagttcaacatcttcatctgaaggccactagaagacgactagcttccaggtggctaggccacacccactccaacaaggccacacccactccaacaaagccacacccatgccaacaaggccacacccactccaacaaggccacacctccaaatagtgcctctccctgggccaagcatattcaaacaccacaccaggcttcctctgctggaccatccactaccctcactctttagcctctcctctgccttttgctggtgctcattctgatgtcagtccagttcccaggtgagtcaggcctgaggacccaataatggacaggaagcctgagagcatactggacccttaccagttgtgtcccagagaatatcccctgcttcctcattcacctcctttgggcacaccattacttcaagaggacaaagaattcaatgttggtgtggcactgaactcagaaaaggaaatgtgtaaagactggaaacaaagatggttttagaaagaaaacagatgagacagggctggtggccccactggtcacaccacacatgcataggtggttcggtgtgttgaggaatgggtagctgagcctctagcctctgaccaggaaacctgatgcctttgatcctgagttgcagccatggcacagagaggtagggtgggaaacctggggcacaggcagagaacagacttgcctggtgttgctgatgttggaaatgcttaggcaggggcagagtcaggtcattaggtccctctgttagaaccacatgggccagcatcttctcaaagccctcatcccattgcccttccttaaagcaccagggaaatctcagaccctctctcctggccaatcctggtatattttagctttgtgacctgactgtaagccattgaggacagtaatccttgtgatgtgaaggggaatgtgccatcccccttctatacaggaggtccctggagcccccaactcactgcccacaccccctgacttgggaagtgggtgtcattggttaatttggtctcaatagatcacccaggcagatctctgtcttttcactagcaccttcagtggccacccagagttaagagactgatctagttgcaacacattaatgagaccacccatcccatgagtggagggttctctggtgcagggagtgagaggggacatttgttgaaagaaggatttttagtttttaaagactgaaaaccacccgacttgaagcaaacacacatttggcctgtacctccattgtctggaagctgcacagagtgagcctctgcagagcccgcattccagcatcattcgcaggtggcctcatgagtatgctgagctgtctagactccgtttgagccctgttgctaggtgagtagcctcaaggcaaaattttgcctctttgaagcagtgtatcttctatcaaatagcccatctcttttgtaggtagactttgcagtgcaaatcagacggtacctagaaagcagcttctgataccaagggctacacgaacctgagaactttgtttgtgtgcattttatacctatgtctatatctgtaggtatgcatttgcgctctctctctctctctctctctctctctctctctctctctctctctgtgtttctctgtgtttgtgtcttgtctatttctcctgtctctgtatgtctctgtgtgtatctgtctgtgactgctttagggaccctgctagtcagcattgccaatgatagtgtgctaaaaataaaacaaaggaccaggggctggagagatggctcagtggttaagatcattgactgctcttccagaggtcctaagttcaattcccagcaaccacatggtgcctcacaaccctctgtaatgggatctgatgccttcttctggtgtgtctgaagacagctacagtgtgctcctatacataaagtaaataaataaatctttaaaaaaaaacagcaaagggtgagaatgaatatttatgttgaatatttatgaatgaatgtttatgttacatatcaaaataattcccaaaatgtaggacttaaagtcccgagtgtttataagcccacacaatttcagagggccacaaacccaggagtagctcaccaagtatgttctggctcagagactctcttgatattggagtctagctatcaaccagggatgtagtcaccaggggctcagttgagagtttggatatctatttcctggtgtaccaggttattggcacgtcccacttcctccagagctccgggttacaaggcaggtaggtctcttcacatatgcattcatgacatgacatgctcatagcctcagttaactcccagagaatctcccgagggaagagcagatggacagacaggcaatcagacactaacatggaagctgcagtgttctattctttaagactcatgccatctcttctgtcatcatccgctagccagacaaatcttctgtgtcacaggggaaggtccaagggtgtggccttccaaaaagtgagagccatctggaaggctgactactgcagcccacctgccacccccagtgattcatccctcctctatccagagtacacttgctctgcccattgttactagttggtgacatcttcagctcagagttcagctcccgtccatagaggtcatgtgcaacatacacacaaaactctctgggtgtagttctttgtatctggttctttctagatctgtgggcctctggtctaaaaggatgagttagctgtactcttacatataaacatacccagtatataactctaggacagacactggggagtcactgccataaacacccattcaagaagagggggcatataactcatttgtctatagctcttctgcaattcagctaggcaaatgccagaggttcctccctcaggtagagtcctgccctgtccctgtcagagttgctctacgtggctctggctccaccctctgccgtggaggtctcacatggagatctctcatgttattgcattcaagatcagtataagatggagatctctcaagtgatggcagtccttgatcagtcagtatgctaggctctcagatctacctctaagtcatccctccatgtctctgaagcatggcatgtgtttgagttattttctcagctggctttctgtgttgtagaacttggggtccaatggcttctgtttattgccgtgtctctggcccttctggtctcactgataaggctcttttgaaaaccaggtagaccttctgtgaaacccgctgttttccacaccactggggaaagctcaccttcaagtcactcaatagtttttctctccttctctttgaccttctgcagaaagaatgccctccagcttctggaggctctcaagtgtggttgagaagacctgtgagtgacccttgaggacagttagaggcacctctgtttcactgagctgtgctggaccatgccagcttccatcctcccaacatcttaaccaagtcccagcctacagtctttggactgtgctttcctgagcatgctggcttctgatctttacccagaagtcatttcctaattttagcatcagatgccatctggttaagtctaggactcttcagaactagcaagttctggttccttttgtgtgtgtgtgacagtccttcttttaactcgtctagctcctctcccagcttacgctactcagcaagaaggaaccaggcaacatctttgacactctggctggaaatgttgaggcaaggtcactgcaccactgtggatatttatacttgttcccctcagcatagcatcttggatgctgctcataaggtccccacctgtggtctctgtaatcctgtcactgcccatgaatcctcacagtggtttatcttaaagtcatgtttctccacagagccttagctcttcacaaacatgtacttgaagtccccattcctgcctactacccaggcctgagacatccccatgtttgagattttgctgcagtagattccctaggcacaagagctccattggttatctcatgccgtgtaataaattagccccggaattagcagtgttagcccacagtgtctgaggttcaaggatccagaacaccagagctgagttcctttggctcaaggcctcttgtgatattgcaggcaagctgtcagccagagcttctccttgtctgatgtgaggctggcaggcctggtccccactggctttaagctgaaggcttcatttctttgcaattgagctgctctacatgatgttcatgcttaggggagaaggagaagaggagaaaggagggaaagaagaaaggagaaataaaggggggaaggaatagaagggagagagaggcagagacagtatggcagagataagataaaggaatgggggaagtggaaattacctgagctcttacaagccactcttctgctgtggaaagcaacctgtcatcccttgtgccatattgtgttagccacacagaactagcctacacagtagaggaagggaccaaacaagtgtgtagtcaggcatagtgatacagagctgtaccccagctgtggtggtttgaataagaatggcccatagagattcgtgtgcgtttgaatgcttggcccatggggagtgacactattaggaggcgtggccttgttggaagaactgtgtcactgtggaggcgagctttgaggtctcctctgctcccagctatgcccactgtggcacagtctcctactgctgcctgtagatcaagatggagaactcttgcctctgccagcatcgtgtatacctgcacactgccatgcttcccaccaagatgacaatggactaaacctctgaagctgtaagccagccctgattaaatgttttcctttgtaagagttgccatggtcatggggtctcatccgtcatggaaccccaaccctcaccaaggcacaacactgaggagaacgaagcagtgacagaggaacatcacgtgcttggcagcttggaaaacaaaagaccctgtttcaaaattttacagtgttcaggctcaagaaatggctcggggttttagagcacgtgttgcggagtttggttcctagcagctaagtcaagtggctcacaactgcctgtaactccagctccaggaactccagcagtctcttctgagcatggacacatgcacacatgcacaccacacacacacacacacacacacacacatagtgaaaaataatcaaaataaataaatcttaaaatcagtagtgtcgatgcaggagtgaagagacattattatctatttaaatttcctgactgtgccctgcccccttccactttaaatgtgaagcttcactaaaagcctggagtgggttgaagtttttgtatttcccgccttctagttcagcttccgagctttctaagaacacccttcttagccagctccctgagctgtcccacctccttcccttcatggctctcttctgcacatctgcagtggagcatcagttaagtgtctcctccctggggaaggcttggagctggaaaatgccattgcctgggcttttgaacagacttgtcctgcagggagccggaggggattccaagaaaaggggaactttccaagctgtaagcatatacatgcacgcaggtatacatgtgcttatatacacaggcatacacacacacatgcatgcacacacacacgtgtacatacaccacacacacacagatgcacacactcaccatataaactctagaatctcaatcattacaacaggctgcacttttaattggaagcataccagaacactggaatctgccaaaaactggtagggaaggcttccatgggtagatgggaaaatacaaaaatattcacagtacaaataatggtgtcttgcccagtctctctcagagtgccctgaagtgggtccaggaggaaagtaagctaagtgcttacgtcctcaatgtacaggggaggtatgtaagactcagaaaggccgggcagctaactacagacctgctagagacctgcggagctgagtgtctcagatctctgaatgcacacacttcctttcatagagtcctggaaggctggtcctgtatagaggatattctctttaccccttcagtgtaagtaacctgaaattgtatactggcccaggtaaggggtcccacttcttatgtgtaagaaggccagctcttctgtggttgatttaggggcacagcagagaaggctgtcagaatggtaaactctaacaggtgtgataaaagatggtgaactaccacacggtgctaggtgctagtggagataaaggggactcgctgactccttcaagtcacttttgaggtacccctggtaaaagcactttaagagaccctgtccccaagtggagaaactggtgcgaagtgccttgtgtacctcgtgcaggcaccaagttatctgtcaccacatttacctgcacatccaaagcccacaagggttgtacttttcctgtctctgaagctgtgggccaggtggcagggccctgagactgggtgtggagtgcccctgagaatggagtatagagctttgctcatggatgacgccagcagacccttcagcatgggagaagcaccagggacattctgaagtctagagagcacacatacacatgtacacttgagcatgtacgcacatacacacatacacacacatatgcacacactaccattgaggcctcctgttgtgaaccctgacattggtttttaacatatgggttgtgacccctttggaggctgaacaacccattcacagggatcacatatcgtatatcctgcatattggatatcctgcatgtcggatatcctgcatgtcggatatttgcattgtgatttataactagcaaaatcacagttatgaattagcaatgaaataattctatggttggggtaacaacatgaggtaccatattacagggtcccagcgttaggaaggctaagaaccactgctctgcagtaaagtaggtttccctagccctctcctgcccagagaataaataccggtcaagtcacatctctagcttaggaaatcaaaaagagctaggtttggtgttggtaggtaaagggatatatagctggatagtttctcccaactatatgggaactggtcacataaaccaagacgacttccctggcttcagttaggttggggacagaaacactgatgtccataccacctgcatctgctccatttacaacaataattactggtgctcctacacggtaccttctgtgccaggcaccttagctggatcaggggccagcacactatctacaaagctctctttgtgaggcataggcctctgtcgcagatgttctcttctgccactgttgtgccaaggcagcctcaatgatacagaaatgagtgctttcatttgcaaaacaaatgatggctggatttggcccacacaccacagtggaccggtccctgatttagattgtcacagctcggtacagcactgccccaccccagagctaaggagaccatgtgtcaggaggcagcatctccttcatgcccatccttcttcttgaggcagccttcattccgtttaacctaagagccattcccagaggcacatttcgaggcagacttggtcctcccatctgactaaaagctatttcctagggccacattgtaaactagaggccttgcctgaggcagactgggaaggcttaaagattcaagtccctaagggtaaccaagaggaagcaactgaaccaccaaggcttaaggacgtctcctcatcctgttgactttgtggttaagacggtttgaacagagtaggagatggagcctatagtaagacagaaagacggacaggcaggcaggcaggtcggcaggcaagaggcaagtgttgcctcagcatctggctgactacacgtcttcctgtacacatctgtgctgcctccagacctcaccgtggagaagcctctgtgggaatgtccacagctcctcagtccagagttcagagctcagccagaaagtggtaggtaggactcttgtgcttggctgcctggccctccccagccctgctggatctgagaactctccttaacctccagagcagcgttgcctctcctccagagaaacagcctaaaatgagtatggctctctgcccatgtgtcctccgttccatcctagctgtgcaagaagacctgcgcaatagccccccgacccaggtctgccttgtgcatggtagggaaagagcctggctttttgtgagcaggtatctcagaggctcattcctccgccctcagcataggccacgtgtatctcctcagacgctgatctatatcagaagaggaaaaagaagagacagcattatcatttgaggggtaccaaggttattttggatcgagcctccattgatggcgcatactgtttaggttaaaaagtcacaatcccggggctttagagatgactcagcagttaagagcactggctactcttccacagaggtcctgagttcaattcccagcaaccatatggtggctcacaaccatctgtaatgggatccaataatgccctcttctggtgttgtctgaagacaactacagtatactcatattaaataaataattaaataagttcgcaatccctataattccctccaaaatggagctacctcatggaggtggtgtctgtgagcgtggagttgtgcctgcgattggctttaccaagcctagtggattgtagatagaggggttatgagagccatacagaaaactgagggctggtcccgggtgggagtggcaaccccgtcatgagccacagagcccctgccgtcctgtctggggaagtatccattaagccctcagatccaaccacagcctccgtagctggtgcagaccaggctgtctctgatggcagcagccccctgagtaaccagttgactgtggggccatagatggagccccaaatcagggaatgtcctggaaggaatcaggagaattcttggtgcagcaggagagcaggattggtcctgagtcagggattggtgtccaagggcagagatgatatatcctaccatagaggagtgtggtcctttgaggagaaggacaatgatgtgtctgcctggcttttcatgtggccagagcagaattcagcaataacgtgagaaaagttactttgcctggtctcttctaggctagaccagtagtgactcttctaggctaagcagactcccttatagttccccccaggaagttgtgaccagtccactcttcctttgaggcctccctcttatctttagagtcctctgcccatttattggggtcttccttatgggggtaaacagcaagttgaggtcccagctagaggttgccaggtgatgctattcagcaaagccacttgggaaaatgagtccatattactctgtcctgtgagcctggatcaaccccaaagtgggagcagccaacaggggcccacattaggcccactggaaaacagaccacaggtcccaactccatggttcccagggtgatgggggccctgcaccagtccctttggaagtatatgaggacccaggaagtggtcaggagaggaagcacaatgcctcttacaggcttcaacgtgggccaagcagtcaaagaatgtatggtctagttacaaaacagaaagtaagatatactgaaaagcctgtataataacaatatagctatgtatgtgcttgtatgtacacacttgtaaataagcatgggtgtgcatacatagagttaagtatgtaatatgcatgttatatatctacccatgctgtatgcttaaatccatatatgtatgtctctacgtctatgtgtgagtattgtattgtacgtgtgtgtgtgtgtgtgtgtgtgtgtgtgtgtgtgtgtgtgtgtgtgtatggttgcatgtgtcacacataattaacacaatgcagggacctgggtttaagagagagaaggctttctggggttaactgggggtcaagcagctttcctgatctgtcccttcagtaagctgggggcagaagacagggggtgatcactcccaataattgacaagacagaagcagaaatccaggcaggatttactgcttggtgcagttcagggacagtaagcaggctgcccttgttcagagaaccctttgaggggcttcaaagtgcaagcagctcagggaggtgaatgtaaccagaaatacatcagagagtcagagccgtgtaccaatctgccactctccccgaaatgtccccaactcaggtgtgcaggcggcatgttcatgggagcttgtccctgacatgggcagcagtagaaaggccagaagcctgtggccttgggaagagggagagaagaagatgaggctgcaagctgccatggacactaagctaggagggagaggacaccattcagaccacgttcccgccgcttgctggaagcttcagattctgagttacacacacgcacatgcatgcacacgcgcgcgcacacacacacatgcacagacacacacacacacacacacacacacacacacttcccctaactctggtcagactacggactgtgggatgcttgctgatgatgcagttcttccaatcaaaatagacggggagcggaatctgagacatccaggcgctgaagtctgctgggaaggtaggcgctccttgccctctgagaacctgcagtgagcctggctttggatgcagggcagagctagcaaacggtccaaaaaatgtttacagagggaagagcggccgagggcagggccgcccgtgatcccggatgtcgtgggaagtggaggaggtggaaaggacacaccagggtggtctggtggttgggatggccgtgttcctgggaagagttgccacaaagcattttccccggcttctccatggcagcgatgttgcttcccagagtgttatgaaaacctgctgttacccggcagcctctctggggggaagtgtccagatctcctcttctgccttccaacatacactgagtcaagacagggtcagtgcaggaagtgggtccctctccacacttctcatggggccgtggttaggaacgtgaggactgggaaggtgaaggggacttctggctggatgccacaacttctcccgcctggcaaaggcaaccatccatcctgttcacagcatgctctggggaaatcagcagttccatgacatggctggaatctggaggcatgctcggccttggcactgagtgggagccagagctgtggcctgatcctgggagcagtctctgggcaggaaactgtgacgtgtgccttggggaagcggcacatgccgggtccacttggggatggctcggctttgctccctccagctcctcctatgattttccctatgggacatatgtgtttcctggaatcctgccctttacacgtgtgggttgtaatggaaggcatggagggagagtggagctctctggaaaggtagccgcagctccagttttcacagtggaggaaaaagtaaaagcaggcctgcgtcgggaactttctagagccgtacaccttggctggtgagcccccagaagcaggaagggatgtagggagtgccctgtgggtaggccagtcatcaggtacttagcctcctcatcccaggaatggtcttcagtcctctgccatctgactaggtatccagggcatggtgccccatcagcatttaggcagctgtgtctccctagagtcccactggtgttcctgctgattgtcattgctatccccacaacccactctatggttgtcacccagcagacccatgcctccctactatgtgtcctgaacagccgcacacgagagctgtggccttgcctccctgccctgctgctccctgtggcttggnnnnnnnnnnnnnnnnnnnnatgtgtttcctggaatcctgccctttacacgtgtgggttgcaatggaaggcatggagggagagtggagctctctggaaaggtagccgcagctccagttttcacagtggaggaaaaagtaaaagcaggcctgcgtcgggaactttctagagccataccaccttggctggtgagcccccagaagcaggaagggatgtagggagtgccctgtgggtaggccagtcatcagggacttagcctcctcatcccaggaatggtcttcagtcctctgccatctgactaggtatccagtcctccaccatctgactggtatccagtcctctgccatctgactaggtatccagggcatggtgccccacaacatttaggcagctgtgtctccctagagtcccactggtgttcctgctgattgtcattgctatccccacaacccactctatggttgttacccagcagacccatgcctccctactatgtgtcctgacagccacacacgagagctgtggccttgcctccctgccctgctgctccctgtggcttggccaggaataggttggagttgccctctatatgtggtccctgttaagccagagtaagcacatggagacaccttacccggtaccagacacttgcccttggcagccctggactacaacttgacacctctgccgggcaatggcggtgttgtctgaaaagccccaccccccacatcttaagatcaaggtcttcaccttccaagcaggaagaaaccacaagatcacacatggttctcatagcatacctacgtgaaaggtcattttcgaccctaactaaaagacgacagccatgatagcgaattgtgaacaatatatacaagtaaattcttaaaaagaaaagaaacctattctagtgtaaaaatgctacgcaaggaattctgggaatgtttgaccattagggattccttggctccaccccttctctccacccacatccaggtcatcagtgattggtccagcttcaccttgaaaacaaacccccagcttcctgtctctgtaaggctaccccagagctctgctggctggctatcatgagtctgttcctgtcgtcaccttagtctctttgcaactgccttttaaatgtcatccagacattagttcccccatttcatgtaggataaatgacaaagtctttccaatgatttaaagacgaggtggcttttatcacttctctgacctttgcttgggtcacgctgaccttgttggagatcttgaacacgtgagtgagctcctactcccgggcctttgcactaacacatctacacgtatcgtgcctctctctccatcctggatccatggctgtactccacttcctcaagtaactgtccaatgtcaccttctcagtgagacctatcctaatctgtctacccgaaagggcacccctagtagagagggtccccagcagtgcacattcacttcctgatccctcttcttgccttccttgcctcaaagggcttcatgggcttcaacacaggggtttgttctctacagaacaacagcttcctaccaagtggtatgtctacagcacagccatggtcaggttgctccagtctcccccttcagcaggctggttcgtggtggacacacaaggagcctttgttagatgcataggcaaaaccttgaccagcctgctcaagtcacctccccttccctcggggcatttcagctccctgtggtcctactgccaactggctagattagtggttctcaacctgtgggtcacgacccttttcagggttgacagaccctttttacaagggccacctaagaccgttggaaaacagatatttgcattacatttcataacagtagcaaaattacctttatgaagaagcaatggaaatgattttatggttgggggtcaccacagcattgaggaactgtaattaaagggtcccagcattaggaagtctgagaaccactggtctaaactgtccttcctgcatcttcccaagagcgaagaggaagcaatctttcacctttgtctaggtggaggtcccctgtcccttaggtccctcctcttccctgggctcactctgacagctctggtagccagtggttttcattcacatctcagcagctgcaggataaacttggctcctcctggcctcgctacttctctaatcagcaccggggactgtgagcaccgagcctaggcaaaaacagcgaggggtggaatttgagggacaagtcaaacacctgagctgagtgccaggtaaactcttcctctaatggtgtggacctggacagttcttcgaaggacagagtccctgtttgatgcttctgggaaaatattcagttgacctggaaggcttcgtactctgttaaatggataaagagggacagaccacaggcagctctgctgcagccccaccctgcccttctgatctggcttgagagctaacttcgaagccctctgcagtggctgtgccttaaagagacaaagtagtgctgtcacctacggctcagcagtgaggtcgatgaagctgtgctgtagatatggaaatccccagtatgggtatcccctccaactattggcctggcagaagtcaggccctgaagagaccacaggaagctgacaggcacagctcggtggggagatggtgtccaagttgtagacacgatccattaatccccagatgccagctggctcctgggtgcctctggccgaggtttcccaggcctgcctgctgagcttcatcaatccccagagagcacagaagtgttggaagaactcttaacaaattacatgacgcacgctctgatatgcagttcacacacagagaaactaaggcagacagttgccacataacttgttccgtgagacacagtggagcagaggtccggctgggacccagtcccttcttcctgtccagcatccgggacacaactgtcctggcctgctgaccccgccccccgccccgcccccagtcagcacagccgtggagcagtgtctggcttccagagagggcttcttccaagatggcgcctgtccttcccatctcccttgtgggggcacccaaacagccaccagccagtggattacacagccagtggattacacaggaaccactctggtggtttgaagcttaagagttttaaaatattttattagtagtcaaatatttaaaatttttcccatcatgctctttggttaaggggaggaagccctgaagagcacagatatgaaaagcctgattgccaggctgaggtgaggataattctgctctttcgatgtgaggtgttctgcccacgtgataatgacatgttgttttgaaacttctctgtagaaaactgtgatttttttttttttacttcataactcatttgtaataaatggagggacatacacccctctgactaaatgggggaaggtttaattttatctctatgtatgttacaaaagagtgcattgccatgcatgttggtgtacatcaataaccctagcactctagaggctgagggggaagaggctaacctgggctacaaactgggacagtttctccaaaacttaaaaaaacaaaaacaaaaacaaaagattatgttaaatatgtgtatcataattcccttctacttgcatatcaacctaaagattgtatttgatatcaaatgacttcattatcctaatagatttttaattccaaagagtgtatacaagatagtatacggctgtaaattgacttttccagtctaaacggccagagcaagggcagacagaggtcactcccaaactgcctcaggtcccacacgggtaaagacaactaatgaagagccttcttgttcccacccacccagtagcaggtctccagatgtgtggtgtcgcacacactgtgtggtgcaggtctccagatgtgtggtgtcgcacacactgtgtggtgcaggtctccagatgtgtggtgtcgcacaagcccacactgggatgcagggttttccttagttcatatgaaagggaaagcggtgtgcaacggtggatgccactgtgcagggtcctcccaggtcccttcagaccatacctgtcttagacagggtttctatccctgcacaaacatcatgaccaagaagcagttggggaggaaagggtttattcagcttacacttccatactgctgttcatcaccaaaggaagtcaggactggaactcaagcaggtcaggaagcaggagctgatgcagaggccatggaagggtgctgcttactggcttgcttcccctgtcttgctcagcttgcttttttaatagaacctaagactgccagctcagggatggcaccactcacaatgggccctccccgcttaatactaattgagaaaatgccnnnnnnnnnnnnnnnnnnnncacacgggtaaaagacaactaatgaagagccttcttgttccccacccacccagtagcaggtctccagatgtgtggtgtcgcacaagcccacactgggatgcagggttttccttagttcatctgaaagggaaagcggtgtgcaacggtggatgccactgtgcagggtcctcccaggtcccttcagaccatacctgtcttagacagggtttctattccctgcacaaacatcatgaccaagaagcgagttggggaggaaagggtttattcagcttacacttccacattgctgttcatcaccaaggaagtcaggactggaactcaagcaggtcaggaagcaggagctgatgcagaggccatggaaggattgcttcccctgtcttgctcagcttgcttttttatagaacctaagactgccagctcagggatggcaccactcacaatgggccctccccgcttgatcactaattgagaaaatgccccacagctggatctcatggaggcatttccccaactgaagctcctttctctgtgataacaccagcctgtgtcaaattgacacataaaaccagccagtacagtacccaatacatacccatatgtcactgtggtctgtagaccacagagccccagagagcatcgtctggagataggagtccttttctgtattgcacctctgaggtgagtgcctgtctaggaaatggaaggggtcacatggtggctgattccactatattttatttggtttgcctagaacataggaatctaactcaagcaaaattcttgccaagcctttgctgactcggccagttcttccagcatgttctctccacattccccactttaaccaaaaagttttgatagctgctattccagaatctccgaaaagttgggtttgggggtgttacttagtcggtagagtttttgcctagcatgcatgaacccctggggtttatgcacttggtgaattcaggcacagtggcacatgcctgtaattgcaacacttgggagttaccggaaacatgatcaaatcttgggtcatcctcagtcacacagcaaatatgagagcagcctgggccttaccagaccctgtcttaaagagcaaataaacaaacgaaatcccagaagagttgtgagaagcataaaggcatcccatctcgccttcccgtggactaccgaccgaccgaccgttaatgtcgcctcccctccttcatctgaattctttcctggtctattggtgaactgcattgccaaaacaatggcccttttctgccagatacttcacaggctgttcctgtcagacaaagactttttcatgaccacaatacaatggttaggatcagaactctgagtcctgtccactaaggtacactaaatctgtgctataacccattaaactctgcagtcctacagtcttcccagacacagggatcctgtctgtctgttaacctaggacaggtctctggcctccgagaatcatggccttgactgtgctcagggaggacctatgtctttgtagtcagcttgtccccaggtctggctccaggcatgtgttcatgttctggtcatcctaccaggaggtggtgctgtccttggctcctgggttgattgtgttacctggttaaaggggggtgggggggggctgcctgctctccatcgtcgagggtttccctgtgtggttctgtgggaaggtcactggaagctaccagtgtttggccttttaccccacggtctccattgatgcttcatgcccgaaacggttgttaatatcaaggttaccaaatcatttcttaatttcaccattccttctaaatatactatttggctttatatcataaagaataatcttaggctagtgtgtgtgtgtgtgtgtacctgtatgtatatatatgtaaatcatgtatgtgcccttggaggccttatgggtaataggaaccaaatctgtctcctctacaggaacagggagtgctcttaaccgttgagccatccgaccagaacttttgtcgtttgttgtgttgtttgtttgagataaagtctctcactggacagcagaagctgattctgaccttgtgatcctcctgtctctgcctctcaagtgcagggattgctagagtacagaactgtgaaaccaagggtctcatgaatgccaagcaagtgccccaaaaccaagccccagcccctagaaagggaagtccttgtcactcatctgcgtgcccttgaacactcccgcttgactgaataggaattccaagtaagtgaaggttatagcttcgtgtctggtgcaagtccctagtgttctggaaggctctgccccaagaaagtatcttctgggaagcatgtccccaggtggcctgactggagagaggctgaggccatgtgtgagcctgttgaaggtcctttggggtcatgtctcaccacagattcatccttccatcagctccaactgaaaaatgtgacccaagggaggcgctgcctcagtcaacgccattttgcatttcctctccttcctgggatggaacaaatggcccttcagggacagtgaacctgtcagtaatgaaattgtgagaggaggcggctgtcccgagagggaggctgctggggtgggggtggctaatggattaatgtagtggccagcagagcctgggaattcctggctctccccagcccatgaagcccaaccagcccccaagcctgttagagccccttgagatcccatacctgcagggcatttgcttcacctaggaaaaacccagagccctccagtcccacccataacctaagatatcctccatgggtgttctgaggctgccagacacacccctgtatccatctatcctcggaggccctgggtaccagattggctcctggaacgtgcctgcctgtacctgtctctcaggcactatgtttgagatctcagggtcacaacctgtttaccagataaaatcctctaggttaacctgggagctagctgcaaagcttccttccttctctgagagtgtgcgcatctatcaacattggccttctgtctccacttatgagtgagtctctggcttggttgcaagcagaccctctctctcatgtcttatatggtctccctctctgtctcttgctaatgaacagatgggactggaagggagtgatttgtgaggatggtgggcccttatacagtaagtgacaaccagagagcaaggaggggggacttgagtgtggtctcttcatccacagagagttagtatagacacacatagcccagaaccagaccctgacccagagcagagctacagtttctctgaagaatttgaggtgattcttctgctccgcttctccatctccacaccaaccactggtatctctgcagctcacatgcacacgtgcaaacacacacacatgcacacacgcattcacacacacagtatctctgcgcctctcctcttacaacgcttttcctgtcctgggtgtcttcccaatccctctcccttccctgactacatcctcagagctcaccagatgtcaagccctgctattgttggtagacttccaatgacctaacagtgctgcctgtattttttaagattatgaagtcggggatattgtcttgtagctacgtgagatacaccggatgctgataacctgagtcagaggttggaaaggaatatatggatggatgcaatctatggtctcaggcaaggctagcccagaagacatactcatttctttcagcagttaaagtaccaactgttcttgcagaagacttgagtttggttcctagcacccacgtgggacagctcacacctgccattgtggattaaacaggcatgtgggtgccaccaccggtagcaagcacttctatgtgcgtacatcctcatcccctcattcacaggagacctgtccccagacccccagtggggaactgtaactatactgcattttctctgtgctacaatttgatttgtaaactaagatcaaagaaatgaatagcagttgataggtgagaacccttataaaaaatggattctagtaacagctctgtgtgtcctattgtgccatggtctccctgcatgtgtgcctgtgagatgacaaaagattctgtgatgagctgaaggaagcctggcttttgcagtctgtggttccactgcaaagctagcccagacttaattgttgttcaatttcacatatagatgctccatgcttggtgtagttcttagctgccacaaaaggttttattctctttccttattaagaaaaaaaaatctaccttttttgcttagctgttccttgcatcactgcgtggcctgtgtatgagctctcaagctatgagataatcactaagaaaacttcttgatcatagatagtacagtcttctaactattaactacttggtatctaacgggtaggtagtatatacggtatggatatatcacagggactatttatgtcccagttgggacagaacaggagaatagcatgtgactgaaaccctgtgggttgtgaactctagggtttttcattttgcattttgcttaaggtgtgtgacttaaactgtggagagccaccccgcaggtgaggtagcactcgtagggtctggagacctggatacaagcaagcaagcaggtataagcaatgaagagaaatctaacatgctctctccagtccatgggtcacatgtgctgaccacacacctctgtcggtagcgcttctcctccagcctcaagtatgggatggaggcagagactcaaggggttgaggcatgcactgatcagagagaaaggcttagaatggagggcatgcttggtatctcctgaatgccagcccacctggtcccctatgggggctgttaactgttggaagaattacacaaggagtcacccctggaaatatattctctatttgtttacatccacagatacagtgaggactgagatgttaaggaatctgctcagggttacagagctggacttgtgctgtgaagatttgaacttagggagtttggttccaaagtcccaattttgaataactacatagctcaagaagaataactatatagctcaaagatgcataggccttgccaagcagcctgcagcgaggggccacagcctgggtttggagacagcaaagtgtggctgggccaagtggaagggtgagggccttcccctggaacctcgccaccaggttcacgtggagcctgacagctcccaagggcagccacgtgctcttcccatgacatcataccgcctcggaactttgaggccaaggattcttggaatgcttgattcatcctggaacaaaaataatactgcgtatttataacgtgcctttgtaccccaaaggctttcctgggctttatttcattgaaagttcaggctagccttgtgactacacaggaatcagagaggcggcaagccaccctgagcagcaccgagcaagattcccactcccccccccccccaaacccctcaccnnnnnnnnnnnnnnnnnnnncaccaagcagagtatccatccacaccccccccaacccctcacccctgtgccacagctagaactgcgtggcttgccagagttatttagcaaattcttgagaaataaggtgcccaagaaccctgatttccaacgagagcgagatgacaaacagggggtcatgagccaccgagtttccctgggaaagccacttccttagcttctgccctgccagagatagagcccacagttctgcatccccctccccgcaaggggcaataatgaagccaaagggccaccctgaaacttggccctggctgtatcccccaggctccagccacaagcaccgcagatgagatgggcaaaagattgtccccagtgcaattggaacccaaggccatgcatggctcctgtggtttgccccagacacagtggagcccaggctggaaggctgttttcctcacaagccgtccttcccacaggccctagcctggctgcccctacccttggtgcctaggccttttcttctgtgtgtctagctcttctgtaccccacattgtctcaggatgacccgcagctcctctccctgtgattttggccaaagtcctctggaatagtggttttagtgtctctgcagcagcttgccagctcccctgggcctcgagatcctggaacaaacttgaaacttgggccaggaaggcgtagtggtcaagactgtatatgcaggggccagactactaagttctaagccaggctcttctggccacttgcaaactaggacaagaaaccctctcatgccctgctgacctcactgcaaagtggagtacgcaatggtacctctccctgagggtaagtggaagccattcctggcgagctgtacatcgagtacgatggctggttttgccactgtgaccctgctcccccgaagtattgagttggctgttacctttggaagccttctgagcaggcctggctacagtgtgttcagcctgcacgctgcataggacaatgtgcttagaagggcctgtggttgactgaatgctaggctgtgactgtcatgatctccaaaattctttgctctggaccccacatgttacatgcaggcctgccttcagtcctgagagtagactgagcccttctctctgcttgcttgcctttgtctcttgtctctggtcagagctacttctagcttctgtaactggtggactgatgtctctaagccctgatataggcattgaagtagcccacttgtgattcacgaaaccccaggacatccagagctgctgtttctttgggcaaccacagaacaggctggtaggagtcagggtcaggaggacaggcatagacagtgaccatggtagacatcaggagtagcagggctctgggctgacttaactcctgaagggaatggggcaatgctgaaagattgcacaggaacactgaacaccgtctgccactcacacacagccctcaaaggatgcttcactaaacctggtgacagcctgaattaacctccaggtggagccaatttaaataagggtgacccgaccacagttggggacaggtgttttctctggctacacagtgctcagggccagtaagaccctccacaagacaagaacatctgttggcctggtaaccctcaggtattcaagggttcatttcccacagtgccatgtcacacttctaaggagactgccttccctgcagtaaagataaagaagaaagccacaaagtatgggcaagtctacagcacagtgtcaggggaacaggagggttccaatgcacaatagccttcatgggggagcaaagcatcatgggagttcctggccgagtttcccatcatcctgtaaatggaagctggagtggctataggttggctctttgtttctgggcctcgggtaccaactctaggcaaagcagccctgtcctgcagggaaatggctggaccctgagcccctgagtttcaccacagtcgtgcaaaggaaaggtcctgtagaggtaggcaggaataaaggggcctgtgctgtaacgagcaatcatcacttttcctgaagacaggaaacacaagctcctgtgtagcttccaagtcactcgcccaggaattttactttcagaatttttaagcagacctacaaattatgtggtaaagggtcccacatggagagaactataataagccaatgggccttggactatctgtttgggagctattatgaaattaaaagaaaaaaagaaagggggagagagagagagagagagagagagagagagagagagagagagacatttgtctccatttagcctgatgttaaaaccatttttaaaaaacaaaattcgaagttactctctatacacctacctcccaaaatgcagctgtggtgtgttctgggaacatttttccccctagaagagtttttagaacaaacccaaatgtctgatttcagaaccgaaagaagacagaatcagctaattggattgtaggagcatgctctgaccattttcattccaaggccattctttttcttctagcagcaggtccatccagggggctcacgtggaatcttgctcttgtccccccaagccatcccttcacctgggaacgagagtcagatcaccccatgaaaaggcaaagcagtcgacactcagccttggacacttgccctttctggcgactgtgctgccaagttgggtgtatgcacagtgctcccccaaactggaccacgtgtacacgcatctgacaatggatgcagccttcttgctcacccacttctaggagtagacgcgactcaccctgacctagccaaacccaaacccacaggtctcgtggggagcagccagctggcccctgacaaaggtatcaatgaaacctagcaccagcaaacactgaagagagcatgctggctttggccagctcacccagctaccactaatgaatatttgtgaatggccagagcagggagccctgggccaccatggttggggaacagggcccaagcctacgtctgtccatgctaccgatggccctctgggttccttgccaggcagagtacatgggcctactgcggttgtttccacaaaagtctctgggaattcagccccgtactcctgggaaactggacctgcgacgaggtgaggggcagacggaaggtggccttcctggtcccacgatgaataagtagataagtctttgaaagcctcgatgggcttatctataaaatgagaagaaaggaggctgaggactccgctcaacaattgggcacttgcctagcgtgtgtaaggatttgagtttcatgcccagcatctctctctctctctctctctctccctctctctctctctctctctctctctctctcacacacacacacacacacacacacacacacacacacacaaggaaggacccctagtccacctgcatacacagaagacaagcccagcagtcacttgtcctgagaagaaggcaaacttcatgccgcatcctctaatgctgcctgtgctcctgctcagtttcccaaggcaaagctgagtcacctccaaagctctgtatccctttggacttctcttagctggggtgactgttgctgcagttaaacacccacggccaaagcagctgggggaggaaagggtttatttggcttacatttgtcatcattgacggaagtcaggacaggaactcaagcagggaaggagcctggaggcaggagctgatgcagaggccatggagagatgtttcttactggcttgctcccccgatgacttgctcagcctgcttcttatagaactcaactcgggacccagggatggaactacccacaatggtctgggccttccccatcaatcactaattatgaagatgccctgcaggtttgtctacaaaaccatcttaaggaggcattttctccattgaggctccctcctttgggatgactctagcttgggtcaagttgacataaaactgtccagcacagttaggagaaagggatccaatggcaggcaacagcatcagagacagtgtctgctccagttgttagagaacccacatgaagaccagggcctcagtgggagaagacctactgtgactggatgtcccaagggggggtggtaccaagtgggggggggctttcccctctcctcagagaaggagggactgggaagagaggagtgatggggggggggctgtagttgggatgtaaagtgaataaactaattaagtagaaatacttgccagcacatagtagggctacttagcttccctctagtctgtggatgcccctctttactcgtaagacaccatcacccagcaaatatgagtctggggacaaccactacagtcagcacactctcagccagtaccattctctcagggttgggggacagggatggggggggatcatattggccatctcaggtcaccccacatctccaggtgaagaatagtgagaccagggtgaattttttctaaagcccttgatggccagccatgtagaaatgacgtcctccttcaagaagacagaagtcttttgccttttttcttttcctactcagagaggtagctgcaggacnnnnnnnnnnnnnnnnnnnnnnnnnnnnnnnnnnnnnnnnnnnnnnnnnnnnnnnnnnnnnnnnnnnnnnnnnnnnnnnnnnnnnnnnnnnnnnnnnnnnnnnnnnnnnnnnnnnnnnnnnnnnnnnnnnnnnnnnnnnnnnnnnnnnnnnnnnnnnnnnnnnnnnnnnnnnnnnnnnnnnnnnnnnnnnnnnnnnnnnnnnnnnnnnnnnnnnnnnnnnnnnnnnnnnnnnnnnnnnnnnnnnnnnnnnnnnnnnnnnnnnnnnnnnnnnnnnnnnnnnnnnnnnnnnnnnnnnnnnnnnnnnnnnnnnnnnnnnnnnnnnnnnnnnnnnnnnnnnnnnnnnnnnnnnnnnnnnnnnnnnnnnnnnnnnnnnnnnnnnnnnnnnnnnnnnnnnnnnnnnnnnnnnnnnnnnnnnnnnnnnnnnnnnnnnnnnnnnnnnnnnnnnnnnnnnnnnnnnnnnnnnnnnnnnnnnnnnnnnnnnnnnnnnnnnnnnnnnnnnnnnnnnnnnnnnnnnnnnnnnnnnnnnnnnnnnnnnnnnnnnnnnnnnnnnnnnnnnnnnnnnnnnnnnnnnnnnnnnnnnnnnnnnnnnnnnnnnnnnnnnnnnnnnnnnnnnnnnnnnnnnnnnnnnnnnnnnnnnnnnnnnnnnnnnnnnnnnnnnnnnnnnnnnnnnnnnnnnnnnnnnnnnnnnnnnnnnnnnnnnnnnnnnnnnnnnnnnnnnnnnnnnnnnnnnnnnnnnnnnnnnnnnnnnnnnnnnnnnnnnnnnnnnnnnnnnnnnnnnnnnnnnnnnnnnnnnnnnnnnnnnnnnnnnnnnnnnnnnnnnnnnnnnnnnnnnnnnnnnnnnnnnnnnnnnnnnnnnnnnnnnnnnnnnnnnnnnnnnnnnnnnnnnnnnnnnnnnnnnnnnnnnnnnnnnnnnnnnnataatcatcaaagtgaagattgatattgaacttataacaaagaagcaaatgtttgatataaatccaatttgtttattaaggataattgcacttaaggttgtgagagcggaggtagatctcaaggtatgggttcattcttgaaactgtaatggctttctcttggtttctgcaccactgtatctatattaaggggcacgtagctattctcaactgcacctccagtgaccccagggttcagaaggcagcctgggagggaccgaaactggccatagtgctgtgagtggtaagacaatgcctcatatccatgcgcctgcccctgccttccaaccatgcagcaagaccttcccatcttggttcctggcacagagcgcagctctgccactggctcttctctgcttacaaagcactgtcctgaagctaaggagcagcgctctgcctaaagctgcagaggtgtcagcacagtggggctctcctgagacctcacttctcagtttgcagatgaccacggatgcctccgcatgggtggcatctttgtgtatgtacagactgcttctcgttataaggacccaagtaggcttggattcaggggcacaccctggcaacatcatatctttaaaatcccagttggctccagagagatacattctgaagaatggagtgagggcttcaaaacgtgaatgttatcagataatgctgctttcaagggacatagctggaggagttgggcagaggctggggggctcgtcacatcttctgctggtccttttagatgcttgttccgtattacatacacgggcacaccgtgtgccacggacgaatcgctgctttttagagaaagttcaacttccattctctctgatggctcatgggagggtcgggataactgttgaaatgatccagactctgatattgtgctccaacgtttggatgaagggaccctaccagttcactatgtaacccctcttttccacctctccattctccttcgtagacggcagcaaagacctccaggagggaacaagccccaacagcatggtgaccatcagccaggcagtgccaaacacaacagggaccaccagaaatcttaccaggggggctcagggccccacccctcggggaggcccacacaccatggctacagccagaaccgacgctggcatcacggcaacatgaaacatccaccgggagacaagggagaagcgggcagccaccgcaacgccaaagagaccgtgaccgttgagaaccccaaacttgaagacggcccaggggacaccggacacagtggccttgagcccccctgcagccctgacactctgaccccagcagcttccgagagaccaacccctcagctgtcaggggggccggaggctgagataaagcataaagacactgttcttcctgagcgtctcagggagcggcccaaaatcaccctgctccagtcttccaaagacaggctgaggcgaaggctgaaggaaaaggaccgggtaattgccttttctttgttctctccctgaggacagctgaaaggtcggcacttggggggtgggctttgggtggagcctcgtgggtcgagacaggggctcctctctaaagggaagagaggctgggtggacacaccacaccaggttgtcaccgccatgggtagccagctgtacttgaaacccttccaacacatactgttcctcctcttctgccccacaagcggtgttggagacgccgggaaatcactagatgccgtggggaatggagttgggtcctatcggtcctgctcagggagtcttaactttctctgaagaggtggtctagaggggactagaaaagaaaaagagcggtcacttctgaccccaccctccccgggtcactcagttctcgagtgggagagcagctgtttgtgcaccttaatcccccccccacatggtcagaagaggctccagtgttctcgcagtgtccccgtgtcaccccaaggggaaagtggctcagagaaggatccacctccccagtgtgcacagccacagagagctggagacagagccgtacctccataggaagctcccaagttaagaacagagggccagcaagcttgggccatgggtctgttctgtttaggtgcatacagtttaagataacctcatgccattttctgcctttccactctacagtcttaccccagttactggacactctcctacgaacataaacaagttgggttgggtttgtttgggttttttgtggggggttgttaatttttctcacaaggcaccagccatgtgaatagcacattgaaagatcttagtgtgcagtatctgtatgcatagagacaggcagtatgggatgctaagccagggccaagtccacatggatccgttcacctaagaacatggcggtccgtgcatttagagcagacacctggtagctacacccaggccaccccagcaccactacatgtgttctggatcctactcaaccccagcttggtctccctcacctcatttcctctttgacccagttttctctctatcatcttcatcttttaaaattcccactaaatcatctctaaataaaggggtctgctggatacatgaggggtaaatgtgtatatgggaatcctgggtaggggctagaactgacaatgtcaaccagccagggcatcagaggagctaaggaaaaaggtctgtgaagtgcagtgtggcgtgtggcgtgtgggagtgacactccctcacatccttctttctggctctcccttcttccttcaggacatcccgaatcccactgagacttcagctccactgaggtgtgttttatgtgtcccccatgtcccccaggacgaagtggcagtagagacaagcagccctcagccaagcaagatggacaggctgatggaaatccttaacagcatgagaaataacagcagcgacgtggatgccaagctcacctccttcatggaggaggcgcagaactccaccaactctgaggagatgctgggggagatcgtgcggaccatctaccagaaggccgtgtcagaccgcagcttcgccttcacggccgccaagctctgcgacaagatggccctcttcatggtcgaggggaccaagttccggagcctgctcctcaacatgctccaggtaaccggacaccgacagctgccgctccactccccggcccctccgactgacgacgagggttattgctagagagagggctgcaagttctggtggcagatgagcttgtcccaagttgcttcctcccttgcctgattaattatagaaaataagcaggcatcaaggggtgagagatgcgcggctggatttgggtgtgtttgtgtgagcgctccatggttacagaggaccaatataattttataggtgctttttgttcaaccgccctctctctctctttctattttcatgataagaggctggctattggccctgtgctttgacctctacgtgtctgtgcggtcatgaacttgctgtggacctggctctccccgctccttctccctggctctcttccccctccttctccctgacctcctaacttccccccttctccttttccttctccgcctccctaaggacagccctcaaaagcttgatgtctctacccttgtaaagcaaggatggcaaagccttgtgaggcaggacgacgacagcctgtctgtttgatgcactgaaacccaaagtagaaagaaagtgtggcaatccaagattttcttgctgcctggtaccttcccacccaatctgcttcccctccagagagcttcccctcattgtcttactcattgtgtgccaaggaccagtgtctaaccacagtcccattgtagtgtgtgatgagtgtgggccagtgcctaaccacagtcccacaggtgagtgtgtaataagtgtgagcacacgcgctcacactgagtccgttatataagtacctgctgtgtatggtaacagttgactggtgagcccagatctggcaacatcggggaagaaatgacagtggaggatggtgacacggtgaccgtatcaggcccaaaggccatctttggagactctggatgggaaaacaatatctttcctgttattttatacaacagagcccaatttagatacaaattgtgtcatcaggcctacctggtagagcagttccttggaagtgaggaaagagggaagcaggggacagagtttaagggaccaccagcagtcatggcgaacatggtgaccatataccagattgtcctaccagtgccacttctgagagtcccctcataattacactcagaattatgacagatgtgctcagggcactggtcacctggttcatggtctgcagtgttgtccctaaaagcagaggggagatccctgctggcccacctgcctgtggcgcactgggccccgtgcctgccgtcttcttgtgtgtgcgtctcgctgtctgcaacctgagcctccctggccagcctcgagcttctcgccagctccaggctctgatcgggttgccattcctggatcgcccattgctcccctggtgatgaattcccgcattacctgagggatttgcacataggcatgttcctcgcgggccggaatgtcctgggagagtggagagggtgacaaacaggcaggagaggcccgtctgccgtgcatcaccaggcacgggggagtcaagggcaggactggcctcagactcagtttggtgatttttttttttcttggagaagggtcagaaacagagtacaggagtacaagctctagaccgtggctgccagccgccagcaatccgttcaaccccacagcagacaggcacacaggcctgtggcacccaggaaatgagaactgtctgcagagactaccccaagatgggttatttcatcaagaactcatggcaagaacccaatggcaatttcaattagtgaagtcctactgtgcgccctaactagcatgcccatgtgaagggagcannnnnnnnnnnnnnnnnnnntggtccaggtatcagcagtcagggccttgcgaatgggctcccagtgcccacacacacacacacaccacacacacacaccacacacacacatacacacacacatacacacacacacacacacacacacacacacacacacacacacacacacaaacatacacacacacaccgtgagatgctcctcttcttactgctccaaggcctggccctgaatgaaggagtcttaggttctcctgtccttgcaaaccaccctcccttacgctgtcactcagagaatgtgagtgactttatgaccagccccagaggccagcttgtcccagggatactcacatcctgccccctgctcccctccaccaccactgaccctctggctgcactctagtggataaacccctacatcttacttagaagtcacttctacccaacgctcagcccattgccaggggccactcaaactcagacaccactcccctgggagattggccagagtctctcgctctctgtttctgcagcattctgtccttctctgccacagcacctgtctctctgttctgtcatgtgactagcactgaccgggtgtccaaggacaccaagcagcacctttgaagccaagggtttaaacgtatacagcaaagacaggaactttatctactaacctacagtgacaaaggaatgcgcgttaccatcatcctgcttcccccggactctgacaggcaggcaccgcctctgctgtgtgcaaatctgtgtctggctgtctgctcagtaccagtactgacaggtcacagtcatggagcaatggcgattgcaagaggagggaaccagaaacatctctctcttttctcccagtcaagaacagaggcccaggtggcaaacaagactcacattgtaagctccaaaggtgcaccctcctggtgaccatactagtggggaaaggcctgtgcctaactggacgatttgtggttcctctataggccatccccatcacccacttcctgtgagccaaggtgggagccctccgaagggtagaaccagaggctttgccttgatacttgagcctctggtaagatcgtctaaagccctttaggctcatagaggaatatcttagccgtgctgggtgaggtgcccaagtacccatggatccctgatcacgtggctgagaggaagcttgcttatctacttgagcctcttcaggctcttccattcctccctgcaaccaaggagagcaggcctttctgagaaagtggcctttcatggtcacttgccacccaagcagggaagtctaaatggaggagcaacagacctggggatccacgttccctcttcacacctctaaggaagtctgtcttcaccacccccagaacccctccctcccttctttctccctgaagttcctggtctccaccggctcagtcccacttgaccctgggtccccagccagccccatgttcagcctggcaagctctgagccagtcatcctggtgtctgatatggctgccatacaggctctgaggcccagcttagtggcatggattgcagaggaaccaggtgtgaagtgcctggtacacacccctcccggcagctgtctctggatatggtcctccctggctgagtgctcttgcgacacgggctatggagccctcgatgagtctggagacatggcagggagaggggcaacctttgatgtggtgaatacttggcaatggaagtccaagactcctgccaagttgagcttcagcacccacaaagtggaaaatggggtgtggaagattgtcataggtcctccccatatagactctctcttgcgccatgtcaataaaccagggaacactgattccctcatgagttccataggcctcagtggatgcccatcaccaattccacagtttagcatgtcagtttctacatctgaactggctctagtctttatcttagatatgggccctttcttagtgtgctcatatgtgctcaaaatcctatttaagtgactattccttaaatgtctattatatgcctatagttgtcattagtatcctgtattcctaccaaacttatagcggtgctgccaggctggtctgagccaccctttccggagaggcattggatagtttatacgggaagggtcactttaatgtctgggcaagcaaggcgacagactcttggcagtatggctctccagcctgagaatgctacacttcagacctctctgttgtggagaacagagaccctcagccgttgtctttggggatcacatggagagctatggctttgccctggggtcctcctcaggtctgggcatagacctggacattgtgtcgtaaagaactcatttgggccatgtgaagtgaacatcactgtcaggacgaaggcccagagacaacaggaaaacctcacccttgtcttttaccaactggcccctcacaccaggaaccagctaaaactcatttctcaggtgctaggccctttgctaatcgatgtggaggactcaaactgagctggtggaaaaacaggagagggaaaccttagctgttggtagagtgctttcacctccaaactcgttttcccttctgtgaggagctgggctcggcccatgttcctcaccatcctccaccctggaaagaggagagaccctcttctcctctcccacgggatttctctgtccctgctctgtctaaaccttctgtttccttcttcttggcccctgccatttgtccgcatggtcattatgtgttttaggtgaagggtctccctttcagccccagtgctgactgggccacccaggagaactggcgacaaccacctctgtggctctgccctgcccgtgaggctcccagatccttcatgggccgaactagccagttctgcgcattgtttccttctttagagactgccggctaccccagacccaagcaaccagaaaagttcccttgatgctcaacagggaattgcagttcagttccaggggagagtaagggctccagtttcatggggaaggaagaatgagtgtgcctctttttatgggaccttaggaatgacaggaatcaaaggcttgagccccctccacccagaactgcctggtcaccgccctctgccttacccttgagcttagagagggctcttttgcccagatctgcttgggtagtacaagttcaagccctcgtctgttgaaatgtgtgtgccctgtttagccgagaggtgtctgcatctgagctatgcagagagaagtattattagagcaagcatcagtgtgcctgtaactgaacccagctctccctagcaactgttgctaacaacacatctaacagaaggatgtgatacctttttttttttttttttttttttttgaagagggaggggggaaaatctcttcatctaaccaagtcataaacacagccgggttgttgtgcaaaggcaactggaaatcaaagtttggcacttggccagatttcaaaataaattgttgtccactggtaccctctagaatgtggtatctcaaaggggccggtctcagccttgagaatgggcgttcggagtgtctggccagatcactgttacagcgttgtgtttgggcctttgataccgagagactcagttggacggtaattctatggggtgtctgggaatgcctttagctctataaggattgctcagatcctctgatctggctaaccttatcaggaaatcaaagtcttgccttaagccccaaagattatgtattccctatcacatcccttagaaatacatggaagcctgctttctttcagtccacacctctgtcctgagcccaagtcctaggcttaggtggaaagaacccaggctgttcctttaactgattgtaagagaaagctctcctgccctctggctctcttggtttctgaaaaatctaaaaccattccctgtatcttaaatccagcattcgcaagcctcatattctacagaagaaagggcagggctggccgtggctctggagtggagcagttctgatctgtagacttctcaaggacaagggcgctggctgttacccttctcaggctcctggcaccgtgactggtacacagcagatgctcagaaaatgcctcactgccctggaaagtggtagagcattgagtttgggaccccagtgctttgcgggacagaagcccattcctgtgtgtgattcttagatgggttccccatatcgaaagagagagaaagacagagaaagtagtttagcaaaagccacagctctaactgtctggactcctagctcccatcccattacccaaataggacaaagattgggagcttagaaatagccattctatgaagccatctatggggactgtaaagaacaccccggggaagggcatgattgcctctgcccctcagactttggtaggacagagctgcctaaaagaacactcctttgtaccccagtccatgtcacctccttacactctgtccctctgcctccctccctgcttgctgccacaccttccatggagcccatgtgcattgcaagcatgtaaaccaatattagtgctggcttggctgggcatgcccaggagagaagtgcattgttctgaattctccagagctggagcaggagccttggactatcaacacacacacacacacacacacacacacacacacacacacacattcgccttcaaggctgctggagccagcagggacaggacacagggctagccggcagtgccagccgttctccacaagcaaaccacagagggtgatttccccaggcccaagagtgtctcattttctcaaaagtcaccggcctctgagcaccctcaggagtaggctgtgtccatgctgaaagccaagcatagggaaagcaatgcagagctggtacactcactggcagcaagcttgcttcatgtatcccaagagaccggtggtcacaggaacttggacctttgcagagtctgtggcaggctgggtccctgcctgagggagctgatgtctgtctccatacccagcccttagccatgctggagccagagtaggtcagaaccatataccttgcttcaagtgtcttgtctgtcctttcgagggagtgagtagattttatttgcttttttccaatggtatatgtctccttccaaccttattgagcacctgctgtgtaccacatcctctggtaggccaggtgtatgtatcagttcattacagactctctggtccccttatcactgttgaaaccagacataggtcccagccaggtctcgggtactcattcaaggaaagagatcagtatttaggccagatctctctggctgttcagttgtgggagtggaataaggacaaggtgacttcttgaagcactgagtccgaggctgtggacctctgcagcactgagtggggcagagcaagtgatgatctgagcattaaaacatggcttggacgcctggctcaccgacacgtgccgatagtcccagcgcttgggagatggaaggaggactgtgagtctgagaatggcctgggttatgtaataaagttcaagccagcctggacaatagggcagcacactgtctcaaaccaagcaaaactaggccacctggaacaaatagctaccctttgagtcccaggtctctaggcaggaggacttctactgtggagccagaactaagaccctagggccttaacctagtggtatggattcctgctgccgcctttgctgaacctgagtgctcagcctcatcttggtacctggtttctgccctgggaaagcccctctaagctatggtagagactgaatgagtgaatgtacccacagccctcaactcaaatccaggccacagcggtggctgccccatgggtacagaggagaacaggaggcccgactctctccaaacagaggccacaccgggcttgtgactcacctctcacttccatgcagattcagtatggggtaagacaggtggtaggagcttagaaaacaaggatctcaggagaggcctgaggacttgatagctttttcctttccagccacccaggtctccaggtcagagaccccgcccccaaacttcacctgggtcaaaccctttctgttctgttttgtttgtgtttggccccggggtttcactgtgtagccccatctggccttgatcgggcaatcccaccccccttctacgattagatttgtttaagctcttccttatctcaggcttgtgtctttgggacaaagagttatgaatgtcctgcctccaaatcagtgtagtagttagtctgccgttacagtaggacaaagcagccttgggtagacaaaatagatggcagtcaggtgcctgccgctgaagaggagcacatggtgttctgtttttcgagtcactgggcccagggagctttccctggtcaggcactatttcatcaagacccatgtccctggccgtgccatctcctcttccttgcacatcctcacctcccaccccggctctgttttccctgctaaatcccctgagagaacttggccagaagcatccctgtctgaggctgccaggcaggtcccgcagataagtgggttatcggagaaggtggctcgggtgtcccaggccccagagggtcacccctggctggctggcagttcacccccagcacctcctcccactgctgctccctcacccagccaggcaggcaggagacagcagatcccttcccaccatctgccccaggcagccgctgggaatccgagctatgctaagccactccagatcagcgcatctcagccctgcctgggcaccgccgccccagacagggcgcctctacctgctgcgccaccactggaaagctggcaccgactgcccagtggaaaaaatccccctgcgggttatgtaactgctccccagcctggccctggctacccaccaaggctggccacccttaaccaaccaccacagagggggagtcatgtcttgaagggaagggtctctctttcaaaaaaggaagcaaatagttctgttattgtgagaccctcctctgggtcccaccgggtccttagagactgaaagaacttgaaaagttaagggtacagctgagccctaagcaagaactctggtcaaggaaccaagcagaccaaagccaacaggaaggaggacacggttttggagaggagagaaaaagagacccctgtattgttactttgttcaacattttgtaaagttaccatcacagacagcatcaaccacttgaaccacttgtaaggcaccacctcagcagcagcaaggacacccacagtgccaagcaacctccccgtcaccccaaacctaagcactggtctcactaaacagtagctccacatcccccggccaccaccccaatccctccaagggttccctactctgaatcacacatacgtacacatgtgcgcatgcgcgagcacacacacacacagacacacacacagacggaatcatgcataccacatttctcttctgagtctacttcacatagcacagtggctttaaacttcatctgtgtgatagcacgtgtcgggtttcctctttgtaaaggctaatatgctgttgtatgtacataccttattttgctcctccatcattgggcacttagggtgtttctatcttttggcttttatgatcagtattgctagaggcatggatgtgcgaggaccagaactcctgatttgattcttgcagatatctatctagaggaagagccgttggatcatagggaaattttatgtttatcttttttaagaactgccggatggtttcctgtacatttttaatggaggaaatgtagtgaatcgagatacaacaaaattgcgtgagggagagagagggtaccacctcacccgaaatcaagctgaggacagaaaggagtctgtaaggtgatccaagcagggaatggagaggcaagggcggctaaattaggacctaggagatgatatgggctcttgagctatagagttccagaattcattttaaaatcacagaccagtagatacctgaagcttctatatagattacccagttcaactcactcgtagagatgagagaccagcggcccagggaattaatggagatgtggtggttataaaatactgtacttttaggcagcttacattaatgatcttggtgtgttgtgtttgtttgaaaaaaaataacttgttttacatttagagaaagtgtgtgtgtgtgtgtgtgtgtgtgtgtgtgtgtgtgttgtatctgtgcatgccatagtattattgtgaaggtcagagaataactttcagtggttagttctctgcttctactgtgtgggtcctggggattatcaggtttggcagcaatcacctttatccactgtgccatcttgccagtcccgatccaagagttcggaggggctacggagttgactgtgaaggaagcatgcaaagattgccactcaccctgccaacatctagactccgtatagactttactcccaagccccttgtgggtacactgccgggacctggcatgtagcttcactcccagaagctataagctgtgtagacagccagccagcacaggaaatgtaagtcagtttcctgcccctcagcaagagccccagtggaccctgcgagtttctgaaaggatagactagttatctgaaaatctgcgaagcttccaataggcagacttccccagccaagggcatctaacctgtgctcttgagtagacttcaagccctctggccacctgtgagaggtgaccaagaagagactctatccctccagctacagcccgaatcaggaagtgagtggacaggcgtggatggagaagagagggaaatcagaaggacagacagacagggaacaggaatgccacacaggagggaattctgcgtgggtctccaactcagtgctacaagagtatctgtgctcacctgttcccagacagccaggtctgtcccctagataaatggaggcccctttacacaaaagccagcccagctcccccaaagaaggctaccaagaggtcaggggcgtagtgggcaccaaaacattggcatgtatcatctctgcctccatgactcccacctagatagcactagatgagcaatcctgtaatgtttccttcaatatggactcacctctgtcctggggagaaggtagtatgccaccaagaagcaggcctatgggcacatgaacctgttgtgtcaactaagccctaggaaaccaagatcaagatacaggctcttgcacaactctgggtccccatcccttgctgcccaacacctagcccttagctttaaaccccttcgcagtggaccagaactgggttaggagttcagagcctttagaaacaggccagtgctttactagccactccctgaccctgattctagctggtctccagggaaaggacaagtgtccccattagacagggagccacatacagggagtgagtatcatttgaccctctgtgtgtcctctgagtccccagacaagccccaaataagagagagagagagagagcgatgcttcaaaccagtttgaaacatcgggacagacatgctcatggaaaacagtgcccttatgggatggccacccttgtcacccaaatatccactatcttgacaaggccctgtaggaaacaggtagatttcagagggtctgtgcacttacctgtgaagaaagggcctgcaagctaccgtaccacaataccatgttctcatcagctaagcgaggctagcaccataagaatatgtggcttagctggtatttggagatgaccctgctccagcataagttcctagacactcatagaatatgtatattgagtaattccaggttcgttggcaccttgcgcgcagaattcttacctctgtgggttctgctagaacatcagttaccttgttactctaggtgttcaaaaaacaaggtagccaggcatgtcctcgcagaatttaggaggctgagacagggaggttgatggacttgaggctagcctgggctaacgtagtgagaccttgcctcaaaacaaaaccagtctgattggaataagatctctaaagtgggcttagaagcagagtcctttgaagtcagccttctgggccatagacacttccctcccagtgacctatacttacaacctgtagaaatggccggagcagccagatgctggccaccttcccctgaccccagtgtgattccatcagaacctgcaatcccctaaccatccacttaactcttcaatcagctggaattgtgatgcttgtctcacagcctgctccctgtcccaaccactgcagggaaaaatccactcaacatggctgtgttctctggagacccacccctccagaaaggatttctgaaaattctctagcacgtcttcctgtctccctggaggagaggcccatgctttcatggccccggataagaaaacctgatacccacacaccagcccagggccacatgcacacagagatttggggatgatacagcctcaaagaaagctcttagaagggctaagtgcagaggctcggctggagtcctgagctctgtactgttaaactgcattgaggggagggaggaactggctattctctaccagctgcgccaagcacccagtgtagatgcaccagaggagaaacagatctacaagtgggcggggggggggagagccagggggagtgggggcttcctggaggaggtggccccaaagggagataggaggctacagtcaatgctaaggctggcataaggagtagtctgttggggatgggagagggccagtggggaggtgtgtccagccttggggggtgaggggggacgctgtccagccaggccatgaccctgctggcgccagcttcccacgagatttcaggccaaggctgcattttaatccaaaactcagacttctacctcaggagttgtgagcttcctgccagcttcaggcctgagcagtatcagggggtaggcagcgcagactgctcatctagaacccaggccagacttaggggaggggtccaaatcccagggtttcacctagcaggtggcattaggagcctagcatccccctgggtccggggggagcccctccccacccccagatcgtagtttctgagttccctagaggaatcctgaggagactggatgtctggagccagtcttgcctcgccgccactgccagcctgtgtacctgtgacaaaaatggaagcctgggtaagttctgtccatgagtagcaggctcttggatgaccgctcaccacccactagtgcctggaacttgtgaaagtcagttggaaggcaggggcagggacagcctcagacagtctagggatggaaggtaagataaacttccttggggtgcacttgacagactaacaggagcagggtttagggttcagcactgaaggaagcagcatgaactgcagaaggtgacattctgactgcagaaggtgacattctgagcaaggcaagtagaataatctcagccaatcggtttacccttccaggggcttcttcacccatataaaatgaggaggttagagatggtttcaaaggtcccttcccgcttattccaaagccttcacactacggggccggtggagacaaggcttcatccctaatgtccccagctgggcaggtctgcagccctggctggctctctgaccattcattttcccacatacccaccttggctgacctgctttggccacacttcctttggaggcagccctgagtaaacagaacagcctgcagggggcgccagcacgcaagacgggcctcacctgcctacagtaatctccccaaacccccaaccccccccccccccgcatttggcaccctgggtttaaaccatgtgaagatgactctggcacccaggctccatcacaaaattttacactgggggtggatgagatcctccagcgaggaccatggggacctctagggcaagctaacatctcatgtatttgtagggtttccggaagccaccggcaggtctgagaggtcccaggcagcctaggcagagggtgagacaagggtctggttccccagggacagaatctgtccagagatatcactgtgtctagggagcccagttgccctcggggaccagagcgctaatgagctccatccctggaggctgcatatttccagctcaggcaggtcggactgtctagcactccttgttcttcccagacagcgggaggaggtgtgaggacaggcctggctgtcagcagtcctcccacacggtgacaggagtggacaggaatctcagaggtgaagaacaggcatgagccttgggataaggcagactgcagccccccaggccttcccaccttgagaaggggcagttaaggaaaggggaggagggcttcttccttgccccaggtgccactctctccaggccttgggtggccctagccagcactgccctcctgcacacactacagaactgactggccttaggttcccacaggggcagctgtgagacccctgcatttcaatgccatccgtttatgccagggtctgtgttggatcactgtgtagtatgaaaccctctagtgggacacttcctgaagttattcacctgcccattttgttaggatcttcctaaagtcgaggactagaagacttggaatcccaaagttctagaaaaagtattgtgagcatcacagcaggcagacagtatggtgactcgtagcttttcttttaaagaactcaagggagccaagcaggaagatggatggagttactttgtagtcagctacaagtgtctgctatctacaggacctatcagccagcagtgtgggacaggagctcatactgatacttagctatgtggcccaagtgaaactgtgcctagagcgtccttcttctctgggccatagttggtagaggaggttcgaaccatggatgtgagacctatgtcctaagtgcctacattacagagacagaaaggaaaacccagaaaggccaggaaacaaagccatacagctagtagaaacagtagcaactggggcccgttcacgttcacatcctgcctttcttagaatgtactgccaactgagtacccacagccagaaacacgtccagaggtcagtgaggttcagtgaggtctggtgaggccaggtacgggcagaaggcaggtggccaagaaaggagacaagaggtagagacagagatgacagagtggttcagagcctacaaactaaacagtgatcgtgtgttctccctctgtcatcccgagacctaagaatatgaggaccgctcttggctgaagctcagtgtggggctgggggtgtgagccttcactccctgtctccctggaaagcgggcagggtccctctctatctgtgaacaggcagcaaactggcctggctgggcctcatgaaggcaagaagaagaaattgaccctttcctggcgagagagccaggcacaggaagggagcactggaagctgaagctctggatggcagggaagggtctgcaggtggctgggatgctcttgttgtgtctttgagcagcctgcgtagtcagagccacatcaagtctgcagaaggcccgagaaagcagataatttcccaggtgaccttgttccttgtgttacctgtttgtacacacatttaactactctctttccaagccccccaaggctaagccttaaactgtaagaagaactagagacagacagacagtgagaactgggtactcttaatgattggggaccatgggggtagtcgcacaagcagcccgagttgcccagacaaagagctgccttgtccgaagttttctcggcctctgtggccatttcttttatttttaaacaacccccattgctatgtgatttgtcatgaccttgtccatcgcagtggccgtggctgcatttcagaagaaaattaagtggctcaggactcgaaactggaaagagcagaaggggtctcactagagggtgaagaatattcaatgctacacattactcacatacacacacacacacacacacacacctccctagccttcacttgttagcatatatcgtctccctgcaaacttggctgcccaccacagacaccttggctcctctgcctgataaaggggaagttttcgtgccgtgcacttgagcgtacactgatacaggggtgtggggcttgctgccggctcaccatgcttcctccccctgtccagacagaagaggcagtgggagctacttgacaggaaagtcccagaggggcaaactggccaggggccactcagcctaacaaacatccattgagctcctgtgtatggctagggaaagagtactcgggtagggcccaaggaaggagggacgttcaaccgtcccttccatgatcctgtccgctctggcgtcccacccctccactgtctggcacggttttcctccacttagatctcagaaagctaagcagccgaaaaaatgctccctaggggaagtcactaaaggcaaacccaccctgtcacaaagctacaaagttcctcttctctttctcactgtcagtctccctggtgaccccgaagggctcccttgcaaaagtttgttctctggactttgtgtttttccctatctgcttgaccgtcctagtgcctgctggctcagaccccagcgccagcccctgtctgtccctgcaaacacaagtcagctgtgtgtgcagacaaagcctgcaactccgcgggggctgggccaggcagaagggacatttccagggaactctgggggcaatggctgggagggcagaggcgaccgtctgattagcagggaatcggcgtcacagtctaaggcagagagggtgcgggggctttggctggtccccaggggccagtggctgtgggtggtgaccaggggaggcagccaggctggaagaaatctgctgtttgagaagtggaggaaaccggctggagcggagagataacagcgtgttctctgtgtgtctgtgtgcgtctgcgtctgccggcgagggcgactggagccaggcggtctgaggccgtatctagtgagatttttgttctgggttgtgaaagtgacccatggagccagcagcagggttcagggcctgggagagaggacacgtgtccctggcctcctccccatgtcttatgctggtctcccctccctcccttggtcaaagcgtagaaggctggtgggggggtggggggtggggcgggcggcatccttaatacaaaggaaatggcacaaaggcctagctttcagcttgattgagccactcgttttgacatatgaacttgaatacttcccctaatatttctggctgtctcagtctccttgactatataatggggattatttatatctttccttgtgtagcccactggatagctggagagttcttatgaaataagggtgtgaaaatagtttataaactgtagagtgacacaaagactgagaatgatgggcacagctatgtcccctggtctgcttaaggaagacttgtcagagtacctcgcggtgggaggcagaggaggtagtgccagataaggaccctggggctcccaagaaggtgactccctcagtaaacaggcaggaagggatgtttccctgggtggggggctcatccctagcttgccctcacaaggagcagctggcctgggtcgagcatagacttctccagggacacaagaaagctgaacgaagacccttatccatggtagccagggggtctgccgttgccagggagataagttacaactgctcagaaatgtgggagagcccctcacttcgctctcttaagcctcaactgccaggtcaccttcttgatcccccatatccccgacctggaaaccagccagatgatctgggaactcagaaggagctggcaagagaggcaagactgtgagtctgggagtctgagagaagctgagctatttaaagcatgcagtgtggggcgagggggtgggggtggcgaatgccacctaccccagnnnnnnnnnnnnnnnnnnnnccttgcaatagcttgcccttccctggcccagatcctgtaccatagggcatccacaggaccatgggtcagatgtcccggctctgagaagctgcagctgatacagcataaaagggcagcccagcctggcctaggggcttgggtcctgtcttctgatcctccaggctgagctgatccagccacataggcgccttgatcccctgtgtcttataaataaggctgatacttatattcctgaagaggaatataagcctgcaaccccagatgtagagggccagtgggcagaagtggaactaggggctttgcctggttgctacttcccatgtctgggtctgacttcttagcacactccaggttaatgtaatatcatacacatacacacacatatatgtatgtatgtatatgtattcaatggccagatacctgtctggagttctaagcccttagttaatatttttttcttctacaagtggcctagtcagatacagagtaccactcaggccacacaagcaggaccagctgagagtaccttagcagagggctttccacaaatcagcatacgaaccaaaactgttcttagacgtgtacagaggctcacccaccgctgtttctgggaagggctgacccttgctctgagactacagatctcctactgccttggcactaaactgccttgcttctagggagtgatggatggacattttaaaaggcattcttaacaaagcagtgtttggaaactctcagtttatcagcccaagaaatcatggagcttggaattctggttcccttgccaacactcagctccccagggcaggatgcagccaggggtgctagtgtctgggcccacaagcccaaggctgtgtatccccagcccagtggtaatttcctcttcagagctagaatctccacccacacccaccccctgttctctcaccatgtggcttgaacatgagcatctgggagcccagagatgctctccaggctgctcctggtggcacatgacatgatgacctcattcataggtgacattacttctcactcactcccgtaacttcacatccatgtccccgtgttctattacccacgtggcccagatgtccccacataaagactcctccagtctcaccctgtctggctcacatactgatggacagccttatccacgccgaggtgtgccagcacctctgtatggtagatacatacagagcatcctcgtaacaaatggaaagatcctctcctgcccctgaagccttataatcctacggcgtggggatacagaaagacaaagccactgagcggtgttacagaggcacgtgtgaactactctgaggatctcatggagaaggccggttctccaagaaagggtgactggtagtcagcaccaatggagggcgcaaagaacctatgtgccggcccatcaactgagcacagtgcacttgggcagaggtggctgggctgaggggccagagccaggttgtgagaacggttcgtcctaccaaggaacagaaaccagacctttgggtccctgggccactggcaaagagtttgtaaggaggaaggtggtgtttcctgactgacattgacaggcctccctctgcggcaggatggagggctagatgagggctgctgcctcctctgcgcaggagacgtaccagagggaacctgcaagaaccaggataggcacaagcaacctccagttgaaaagcgccgggcacacgcctttaatcccagcacttgggaggcagaggcaggcagatttctgagttcgaggccagcctggtctacagtgtgagttccaggacagccagggatattcagagaaaccctatctcgaaaaaaacaaaacgaaaagtgacagtagaaccagcctcaacggctccatcaccaactgagaaagcaaggtgaaggaccgtgacccagaaagaacaggacaccaagccaaagtcacctagtctgggaaccaaggtcagggatccacccaggagtggcagactctgaggaactggttttaggtgagaagccacagaaggcagtgggtgagtgggtggggggtattggaggtttccagcttgggtgggacctcttccttgagcatgcacagacagcactctgagtggcaggacccttgggcagagtggtcacacacaccctgtgcacgtctcctgggctcaaggaggacacattccacctgagacttttctacaggttattcccaatgatgaccagtctgggatttgaggataaggatgctgagcctggacagttgggatggcttttatgaggtcctccagagtcccttacgcttgcccccgaaggcatcaggactgggtacacctgggcatcgcatcaccaccagagcaattgaaccagtaaggagtcagttaggacagagaaccaacaagggcaaaggtcagtcctggcagaagggcctcccctgtagcctgtagcctacctcccagagcaaaacagattcccaccatggggaatagagggctgttggcttccacttcagatgacctttggactgtctgagcccagcagggaacaatgcgaagggtctggaccgtagccacattcctgcataggtgcaggccataactctgctgctatagtgtcctctgtctgtaccagggcccttcacctgctttctcacatggtgatagagctgtcaggaattatagcggtgcctgacacattgtaaacactcaataaatacccagggttgggaatggggggggggggaattgcccgttgtcactgtgctgtccctcagttgctgagcagacaccagataaggcacgccccaggcagggacaggtgaacaatctaattagtcattggctggttttccttttgccagaattcctggtctacagaacccatgcctagaactctgaaggtaaaagaaagatcaggccagctgtctttcctccttggccacaccttagcatagctgtgagccttccttccctgctgtgactactgccacccctgctcccatcagactaactctagaaaaatccttctgcctggggcaggggttagggattagagtaaatgacctctgagtgtctccggcccagtgcagcagtaaagtcctcttcttttactcagccactcagcctgggccccacaggggactacagccatatggttcacctagcagactggatgagggtcctggggctgactctttgtttggggcctccacaccattgaggcaggggcggggccgtgtcctgacaacagccgtacctttcactggccctcttagagcagctgtgagggacagagacaagagacagatgaccaaggtctgctccgtcctcagtatttgtaaaacatggcagaaaggcccatccatgaaccactgtggcccttgtcagttctctgttctgtttgaaaacggaaaactaggggagggtaggagaaaagaggaggaagaggaagggaggaagaaaacggaggggggaaggggaggggtcccacatctcttagaaggcttttcctcttgcttttctgcttcagcgggcgcattcacttgcaggctgtacagccgtcctgcctcagctgctccttggcccttaaatactgctacccccaaaccaggaatggcaagccctagccctggccctgacctccaggtctccctccttcatcctggaagggaggtgtgtgtgactgtggtctgatcacatgttccctggtaacatggaagactcggaaaagctgacggtcatgggttcgcggtgccaagggatgccagcttggcagtcctgagtatacagactctctgtgtcagttaagaaagaacggagctcagtgctcctgcttcaggtttctgagtgaaaactcccacaggaaacattcgaggaggctcaccctccagccactggaggagagggggcagcttttagttgtgtccttttcccagggcagagatgggaaatagaaaaagaatacaacataatttgagttaagatgctgtttggggactgggacagctatctttttgggcagagccccattctatggaccttgcctctcaagcagagttgctggggcctgaacaaggggaacagccagtgtttcaggccagggttcaaggagttcgggttctcctctgggcctcgctcctgagagtagagatgttaggcaccatcagtgagtcatgagacagtgctcctctgtctccccatacagcccagggaccctaccaggagcatttgacaccccctccctctggctacacagctgccctgtagtagctgcattgccaaggagatctccgaagcaaagaaggtttgagaaactcactaaacagccagaaagtgaagggtagccttctttgtagataagactcatgtatatgggaaggatggaggagtgtgtgtgtgtgtgtgtgtgtgtgtgtgtatgtcttcagtaggggcaaaacacaagacccatggctatgactgagacacagtggccatactcagaaatggaagcaaaaagaaacccttggacttttgtgtacagtgggagtgaacttggcaccacccccaccttggaggtgtggccactggaggactctgttgtggcacagttgtgacatggagttggttgatagtggccaagactgttccaggcttaccttccaacaagaaatgcttaaggcccggggtccctgggcagatgcagcagtgtcatgtttaccctggcactacctgacacctgtcggatgtgtgcagcttctttgaacacagtccttctagaccacagtatccttccatagcaggaagggctggaccagagaagcctttagtcattatctttggctttggggatatgacggctgacttatagtttcctacaaatatggtgaacaatggtagacctaggtgcaaattcctgatccgtagtatactacagatgtggtacactaccatgtggccttggctaagtttcgtattctttccaagcctcagtttccttaataataagggggtggggctttaatgagaacactctatggactaactataggaattaaattatataatgtatgtaaagggtctagcacaacaccggcaccctctgtaagccctcagagattcaactggaagccggttgaggtaactgtgataagaatttgcattttagtttgtcatcacatacacaatcaagtataaatgagggacgtaccacatccttaaaacagaaacttatgatatttagatgttagttccttttatctgtacgtagcccaagctggcttcctgctcagttatcctgccttagagtcccaagtggtaagattacaaatgagcatccttagtacagcccttccgcagtggtactataattaagcatctctagatccaacagtcccaacctaaggaccaacagagtttctggcaaaaattggccaaatttcttgatgggaggtaagcctgggacagtcttggccactatcaaccaactccatgtcacaactgtgccatcttctctccagtggcctgcacctccaagtggggtatcaagttcatcctcactgtgcaaaagagtccaagggtttctttacttctctgagtatggtcactgtgtctcagtcatagccatgggtcttctgttttgtccctactgaagacacacatacacacactctaaactgtatatggaaactcagaggatctgaaacaatatccaaaagtcttggggggaaaaggaagtttattaagtataactaagaacagtttggggtgtcaggaagcttacggctccgtagggaagagtagatgttttagtaaacacctctctcagttccccaggagtgtaggtcaagaatgaagacgtcagagcctgacccctgaccctgagtggcagttctgttcatcatgatcatcacctctcagtatcccaggtgcctctaatgtacaatggcataattatagtaccactgccgaagggctgtactaaggacttagccagttaatgcactggtggggtacactctttgaatagaaccccaagctcggtggtattgcttggactgaccagagctcctcatgtaagaatgagtctcatataaacgctatgatatttgagagagaccacacggttagaacactcaataatgctcagaggggttcagaggccagggagctttgaacttgggttggcaggggatgtgcacaaaaggggtgggggtggagctgagtacaatttgcatgcaaatctgcccagatgtcctggcactcaaagctgggctgagaatgggaagagaaggtcagagctcctgcccttcgacccctgtaccatggagaaagacatctggaaacgtgaacacgtactgaaaggctgttgctgagatgctaaggcatcctagatccaacctccttgcctgagacccaggctcaaagttgctggtgcagtgtcactaggcttaaggttaaacacagagatggtctcctgcagacctggagtgaacaaagataacaaggattctgcaaggggttgcctgggccctgaggagacttgctggaaagacacattccaggggtcgtttgactaaggggacaccaccagcgttagtcaccgaagggcagcctgccaggtcctccaggacgccaagcagaaccctctggctcaggcccagcttagcagttccctccccgccccctggatacacgtagctcaccaggcctggggatatttccagaaagtctaagaaagtcctgggtctggggaggctgagagagtgcctgcccagggctgagggccaggtccctcacagagaaacagacgtgcggaggggaggggatgtgaggggagggaaggcgaggggaggggcagaggacgtgaccggcagctttcattccgggagaccggggatttcagaggaatgcagccaactcggcctctcaagttcctacttcagaccccgcccggctggagcctagggcgcctgccggggccaccttagaaatcagagggatgtgtcacaggcagtgctgtggaggggaacacgtcctgcctatagttctgtgagcagactcacccccacccgacccagtccggttcctgaaagcgccttctggttctgcagagccaggggagccgcactgactcagcttccttctctcagtccccaaacctggccacctacagtctctaccagaaacatctcagcgcctagaaacacccagtgcttctaggaatatcacatctctatcatcaaggtcatgagtacacctgggggaaaaagagaaatagactgcaccgcccacccctacactatggctccgcccaccccaaactatggctccgcccaccccaaactatggcttcagtctagagggagggacactggctgaaaaggctccacgggcccaggtagctcacaaggctcctcctgcatggctggctggccatgttgtgagagtcatttgctagacagttgaggaacaagattgaggaggggaagagatccgtccggatgtcctgccacagacatgtttgtggatttacccccattttctccttccttccatccccgtttctatcaagctctggacagaccggcaggctccaaggctgaactagcagagacccagaaaaaaaagaggaggggctgttttcaggaagctggctgtctttcatcatttctctgccccgacccctaccccaactggttgaacgctactcctctgcccacttagttctgctcgccctggggttcctcctcttagtgacagtgaatagtttacaggaatgtacctgtggcttgcccagagagcccgaggccccgagttttaatatgtgttctccctcccagagccagcccagcttagcctgcctgcacccctctattttctgattcctaagattccgtacaaatagcccttcctgttcacccaggctcctgatgtctgtctgctccctcactgggcatgtagctctttgctgcctgttgtttctggcctcctttcaagggtccgttcctatctctctaactacatttcacgcaacttgactcttggggcggtctatgaacacctacaaacagcctactgtgtgccaagcctggactacaggaggggagcccgtagtaggcagaatagaccaaacaacatgtcgtgaacgaagcaaggaacacagaggccagggatcagtaaccaagcaggttacttctttcttattctgcagttaagtgtgcagggaattcgtaactcttgagagacccaacccagagtgcaaaatcccagaggcaggatatgcctgccccgtggagcaaggccagcagccagcactggaaggacttaggtcatcagggtgagggatctgcaggctgccacgaggctctgtgtcagtactagaggaatggaatgtgtagagattgtgatcgagactgtgtctgactcagggtcaaccctagctgcttgggttgaagtggtctgagttgggtgtgggggggaaccagcttgcaggcttcaggagagggctccaaggaaagggtggcaggggagctcaaaggaggggctcaagggtcaggtgcaaatatctaagacattctggtgttcggaggtgtaatctggcagggatagacccaggagacatcaggtggcctttaaagccaaatgactagctgtggtccccagggacagtgaccagtgagaagagcactcatgtcacacaggagctgcctctggaccctgaagttaggaatgagtgggtgacaggcctgtcgcttgcaccctgcatggcagagatgagaggcagggggctctagcagctcgtcctagaaccctcttccacgctggcccagcagagggcacatgggggccagttcacaccacttccgaactgaggcttctccaacggagggagaaacaggggcaaggccacagtccctgttaccccaaacctcttgacgtttcataggaaaacggtgtcgttttatctgtccatccctctgcgaggcttaaatttcatcttccagaaaagtgacccggagcccggagcacaggacaggcacctctgctatctttgccccctgtggctttatataactcaggccttttcgcacagccattcacaaccctggcttctgtcctgctgtgccaataagattaagtattcagctcccactatattttctcctctgtactggtgacaagatgtcccctgcctccacgacagtgtctcgggtaaacagaacacagttggccctctgcatccttgaattctacctttgcagttcaaccaactgcaagcagaaagaaactttttttttttttttaggattctagaacgttccaaaacacaaaacttaaaatttccacatactgagtgccatgttgtagcaaagtgatctgtaggcatttaggtttgacattactagttatctagagatggtttaaagtatacacaggaggatgtaaccgttagtcatgaacacagtgccgttttatataaaggatttggatatcttaaggtttggacaactataggaatactgaaaaataaaggtgcccaggtaggagataatatgttgggtggtcatgggctccagtggactttttaataaatagccaagttgaagtttaccttcattgactctccccaccccccaaacacacacacacacacaaatggcttccagatacttctttgaggtcactgcacaaatacaaaaggaagatggagttgctcaaaaatggcccaaattcctggtttaattccacctattcaccgttccgtgtgtttctagagagatggttaagcatatggaagatgtctgacgtactgtactacttagttcagcttacagacaggatcccgagaggaactcccagccgcccaagagcacttagtaccggcagtgagagatcaacacttgagtacaattggggtcccttctactcctggtaccgtcttccctgctctgcaacagattttgtgccatatcactgcctctctagaagagaggggaaacccagactcctttgggatcctttggacctaccgattaatggcccaaagaatgtcttccaggccccaagaggataccgtggggtcttgctacctcatttatcccatttccactcccttagcagatctgttccctctaagctaggtacagagctgagacagggtgagtcctgagtgaggctgagtcaccccagacaaggacagtgtaggtctagcacagtcaagatggaaggacaaaagctgagctaagagacacaaatgaaaagttaggaccctcgcccaagcctgcatctgacaagccaggcctccggtggcctccccagggtagaggagggactgtgaggccaggagaagatgtgctttgacaggcggctctggataagcaggctgatgggcctctctgtagtcaacctcttgacatggtgcatatagggacgttagggatgcggagggaagtttagggatgctcgtcccagaatagatttaaaactagggcagcctcacagagcacctaagctgattgaaagcaggtaggattgaaacagatgctttctggagatgcctgtcagacccaagtatgtcaaaacgctgtaggttttccccgattgttcagcagacctcggggcacagcttaggacgttcattccccctgggctccttgtacatactgcattagaaccagcatctgacagaggagcaccagacagacccaccagtgtccacagaaggagagacccaaggcaggtggggcagggtgtagatgagtggacagatgatgcttgtagcactacctgtcctccagatgagctggctctggttctgggagggcattggtaaccacgtggaaatcctaagtggttagtcttcccttcactccctgtatcagtggatgttactgtcactttaagagtgagccatggtctggaagcccattctggcccactattttggtcccccgtggcaaagttagtttttgcagaagagaccatgacatgcttcttcatgggaagttcaccgggacacatgannnnnnnnnnnnnnnnnnnnnnnnnnnnnnnnnnnnnnnnnnnnnnnnnnnnnnnnnnnnnnnnnnnnnnnnnnnnnnnnnnnnnnnnnnnnnnnnnnnnnnnnnnnnnnnnnnnnnnnnnnnnnnnnnnnnnnnnnnnnnnnnnnnnnnnnnnnnnnnnnnnnnnnnnnnnnnnnatccacaccccccccccaacatgagctcgagccccatcttggaaaggccaagccatctagtgtccgtagccctccatcaggtatcatggtacctatggtataagtcattggtactgtagattgtcaggaaaacaaccatgacagactagtgtcaaaaaaggcaaaatatttcatatctaaaatatgattttagatcaacaggagtctgtggaagaggaagttggctgagaccattacagcagaaagctaatctgcatgaacagaaggcagaggccacctgactatctgatggcacctaatatctatgcccagacactccaatgtgtgtacctcatagccacccaagccatccctggggaaaactcagagcagacgccaattcacactctcagtttctggaataggcgatagtactccctgaaagccccaaggttgtggatatataaggggtcttgggagctagtggttttatcttagtgagaagtgtggcttagggtcctgcatgacagtttgcatcagatgtgctcagcctgaggaaagttactgtgtccttatcaaagtgtccccagagccaccactatttcctataatggtttaccctaggggagtcaaaaacctctggattcttgcctgcagagcctcctgtctatagagtcctgcttctctcacaaaaaggcaagtttcaaatcggctgagatgggccagcatgacttgttgtggatatgtgtcctgtagtttgactggtaacttcatggagagacagcctttctagcagaggagggctgacagcatggcctcgggtgctatggcattcccaggtgagagatgcccaagagggtctccattgaagcatcaccccttggagtgaggcctgcccttgtggatctgaagctgccctctctccctctaggataggaattggatgcttagagttcatgtgagaagtggtggggtacatcttatgaactgctgggcagagggacctcagcaaggccaggtgacctgccagagcttacctagctctctgcactgtccttgggtacttactaaggacgtcagccctgtgttgggcagggccaacttcacgtggaaggagtaagcagacctctgcccacggttacagcatggcatgacgtggaggaacagcacttcctctgtgggcagcggagccagcacccctaggggcatgctgggccaggaggtgccagacactacccatccctccagcttcctgtccccttcttctgcaggcctaggagggagttgcggttatttttatctgaggacactggagtgggaggtatttgtcagcatcatctggtaaaggcaattgaattgtctgtggtgctaagcatgcgaggctgttcacatttaaaaatacagttggacccgtgacagctgatgtgttcatagtgctgacatcacaacctaaacccagacggtcggatcctgagcccagcctttcagaaagccatggttctgtgtctgccatctatggaagaggaaaaaatggtcacagtctctaggttgccggtagggcaggtaatctccaccctatcctggggtgttggatctgacagtgcagtcactggacatgccagtacatgctacatgcagcccccatgtctctaaggacagtttcagcgtgtcgctgcggaggaccttacattaaagtttccttattgggtgtgatacctaacattttcccagtgtttctgagtcttaccgtgttccaagaggcggcctcaccagggctgtgggagtgtgtgtccttgactgttttctgttgctataacaaaaatgaagcaaactcatttatggacatctttcttcagctcacggttctgaagccggaaggcgaagaggagggaatggcctttactgaggggcttcgtgctaccttgttagatgacagaagacttcagggcaagtgagctcatgaggaaagaaagtgtgaggtagactccctgtaacaggcagttctcacatggcctcaccgcctgtcttattctattgccgtgcagagacaccatgacagtggcaactcttataaaggaaagcatttagttagggctggcttaccatttctgaggttcagaccattatcatcatggcgggaagcctggtggcatgcaggcagccatggagctgtggaagtagcagagagtgctacatctggatcggcaagcagcaggaagagacagagactcactggccaagcttgaatgtctaagaccttaaatcctaccccctgtgacacacttcctcctacaagatcacatctagggctggtgagatggctcagtgggtaagagcaccctactgttctcccgaaggtcccggagttcaaatcccagcaaccacatggtggctcacaaccatctgtaacaagatctgactccctcttctggacagctacagtgtacttacatataataaataaataaatctttaaaaaaaaannnnnnnnnnnnnnnnnnnnnnnnnnnnnnnnnnnnnnnnnnnnnnnnnnnnnnnnnnnnnnnnnnnnnnnnnnnnnnnnnnnnnnnnnnnnnnnnnnnnnnnnnnnnnnnnnnnnnnnnnnnnnnnnnnnnnnnnnnnnnnnnnnnnnnnnnnnnnnnnnnnnnnnnnnnnnnnnnnnnnnnnnnnnnnnnnnnnnnnnnnnnnnnnnnnnnnnnnnnnnnnnnnnnnnnnnnnnnnnnnnnnnnnnnnnnnnnnnnnnnnnnnnnnnnnnnnnnnnnnnnnnnnnnnnnnnnnnnnnnnnnnnnnnnnnnnnnnnnnnnnnnnnnnnnnnnnnnnnnnnnnnnnnnnnnnnnnnnnnnnnnnnnnnnnnnnnnnnnnnnnnnnnnnnnnnnnnnnnnnnnnnnnnnnnnnnnnnnnnnnnnnnnnnnnnnnnnnnnnnnnnnnnnnnnnnnnnnnnnnnnnnnnnnnnnnnnnnnnnnnnnnnnnnnnnnnnnnnnnnnnnnnnnnnnnnnnnnnnnnnnnnnnnnnnnnnnnnnnnnnnnnnnnnnnnnnnnnnnnnnnnnnnnnnnnnnnnnnnnnnnnnnnnnnnnnnnnnnnnnnnnnnnnnnnnnnnnnnnnnnnnnnnnnnnnnnnnnnnnnnnnnnnnnnnnnnnnnnnnnnnnnnnnnnnnnnnnnnnnnnnnnnnnnnnnnnnnnnnnnnnnnnnnnnnnnnnnnnnnnnnnnnnnnnnnnnnnnnnnnnnnnnnnnnnnnnnnnnnnnnnnnnnnnnnnnnnnnnnnnnnnnnnnnnnnnnnnnnnnnnnnnnnnnnnnnnnnnnnnnnnnnnnnnnnnnnnnnnnnnnnnnnnnnnnnnnnnnnnnnnnnnnnnnnnnnnnnnnnnnnnnnnnnnnnnnnnnnnnnnnnnnnnnnnnnnnnnnnnnnnnnnnnnnnnnnnnnnnnnnnnnnnnnnnnnnnnnnnnnnnnnnnnnnnnnnnnnnnnnnnnnnnnnnnnnnnnnnnnnnnnnnnnnnnnnnnnnnnnnnnnnnnnnnnnnnnnnnnnnnnnnnnnnnnnnnnnnnnnnnnnnnnnnnnnnnnnnnnnnnnnnnnnnnnnnnnnnnnnnnnnnnnnnnnnnnnnnnnnnnnnnnnnnnnnnnnnnnnnnnnnnnnnnnnnnnnnnnnnnnnnnnnnnnnnnnnnnnnnnnnnnnnnnnnnnnnnnnnnnnnnnnnnnnnnnnnnnnnnnnnnnnnnnnnnnnnnnnnnnnnnnnnnnnnnnnnnnnnnnnnnnnnnnnnnnnnnnnnnnnnnnnnnnnnnnnnnnnnnnnnnnnnnnnnnnnnnnnnnnnnnnnnnnnnnnnnnnnnnnnnnnnnnnnnnnnnnnnnnnnnnnnnnnnnnnnnnnnnnnnnnnnnnnnnnnnnnnnnnnnnnnnnnnnnnnnnnnnnnnnnnnnnnnnnnnnnnnnnnnnnnnnnnnnnnnnnnnnnnnnnnnnnnnnnnnnnnnnnnnnnnnnnnnnnnnnnnnnnnnnnnnnnnnnnnnnnnnnnnnnnnnnnnnnnnnnnnnnnnnnnnnnnnnnnnnnnnnnnnnnnnnnnnnnnnnnnnnnnnnnnnnnnnnnnnnnnnnnnnnnnnnnnnnnnnnnnnnnnnnnnnnnnnnnnnnnnnnnnnnnnnnnnnnnnnnnnnnnnnnnnnnnnnnnnnnnnnnnnnnnnnnnnnnnnnnnnnnnnnnnnnnnnnnnnnnnnnnnnnnnnnnnnnnnnnnnnnnnnnnnnnnnnnnnnnnnnnnnnnnnnnnnnnnnnnnnnnnnnnnnnnnnnnnnnnnnnnnnnnnnnnnnnnnnnnnnnnnnnnnnnnnnnnnnnnnnnnnnnnnnnnnnnnnnnnnnnnnnnnnnnnnnnnnnnnnnnnnnnnnnnnnnnnnnnnnnnnnnnnnnnnnnnnnnnnnnnnnnnnnnnnnnnnnnnnnnnnnnnnnnnnnnnnnnnnnnnnnnnnnnnnnnnnnnnnnnnnnnnnnnnnnnnnnnnnnnnnnnnnnnnnnnnnnnnnnnnnnnnnnnnnnnnnnnnnnnnnnnnnnnnnnnnnnnnnnnnnnnnnnnnnnnnnnnnnnnnnnnnnnnnnnnnnnnnnnnnnnnnnnnnnnnnnnnnnnnnnnnnnnnnnnnnnnnnnnnnnnnnnnnnnnnnnnnnnnnnnnnnnnnnnnnnnnnnnnnnnnnnnnnnnnnnnnnnnnnnnnnnnnnnnnnnnnnnnnnnnnnnnnnnnnnnnnnnnnnnnnnnnnnnnnnnnnnnnnnnnnnnnnnnnnnnnnnnnnnnnnnnnnnnnnnnnnnnnnnnnnnnnnnnnnnnnnnnnnnnnnnnnnnnnnnnnnnnnnnnnnnnnnnnnnnnnnnnnnnnnnnnnnnnnnnnnnnnnnnnnnnnnnnnnnnnnnnnnnnnnnnnnnnnnnnnnnnnnnnnnnnnnnnnnnnnnnnnnnnnnnnnnnnnnnnnnnnnnnnnnnnnnnnnnnnnnnnnnnnnnnnnnnnnnnnnnnnnnnnnnnnnnnnnnnnnnnnnnnnnnnnnnnnnnnnnnnnnnnnnnnnnnnnnnnnnnnnnnnnnnnnnnnnnnnnnnnnnnnnnnnnnnnnnnnnnnnnnnnnnnnnnnnnnnnnnnnnnnnnnnnnnnnnnnnnnnnnnnnnnnnnnnnnnnnnnnnnnnnnnnnnnnnnnnnnnnnnnnnnnnnnnnnnnnnnnnnnnnnnnnnnnnnnnnnnnnnnnnnnnnnnnnnnnnnnnnnnnnnnnnnnnnnnnnnnnnnnnnnnnnnnnnnnnnnnnnnnnnnnnnnnnnnnnnnnnnnnnnnnnnnnnnnnnnnnnnnnnnnnnnnnnnnnnnnnnnnnnnnnnnnnnnnnnnnnnnnnnnnnnnnnnnnnnnnnnnnnnnnnnnnnnnnnnnnnnnnnnnnnnnnnnnnnnnnnnnnnnnnnnnnnnnnnnnnnnnnnnnnnnnnnnnnnnnnnnnnnnnnnnnnnnnnnnnnnnnnnnnnnnnnnnnnnnnnnnnnnnnnnnnnnnnnnnnnnnnnnnnnnnnnnnnnnnnnnnnnnnnnnnnnnnnnnnnnnnnnnnnnnnnnnnnnnnnnnnnnnnnnnnnnnnnnnnnnnnnnnnnnnnnnnnnnnnnnnnnnnnnnnnnnnnnnnnnnnnnnnnnnnnnnnnnnnnnnnnnnnnnnnnnnnnnnnnnnnnnnnnnnnnnnnnnnnnnnnnnnnnnnnnnnnnnnnnnnnnnnnnnnnnnnnnnnnnnnnnnnnnnnnnnnnnnnnnnnnnnnnnnnnnnnnnnnnnnnnnnnnnnnnnnnnnnnnnnnnnnnnnnnnnnnnnnnnnnnnnnnnnnnnnnnnnnnnnnnnnnnnnnnnnnnnnnnnnnnnnnnnnnnnnnnnnnnnnnnnnnnnnnnnnnnnnnnnnnnnnnnnnnnnnnnnnnnnnnnnnnnnnnnnnnnnnnnnnnnnnnnnnnnnnnnnnnnnnnnnnnnnnnnnnnnnnnnnnnnnnnnnnnnnnnnnnnnnnnnnnnnnnnnnnnnnnnnnnnnnnnnnnnnnnnnnnnnnnnnnnnnnnnnnnnnnnnnnnnnnnnnnnnnnnnnnnnnnnnnnnnnnnnnnnnnnnnnnnnnnnnnnnnnnnnnnnnnnnnnnnnnnnnnnnnnnnnnnnnnnnnnnnnnnnnnnnnnnnnnnnnnnnnnnnnnnnnnnnnnnnnnnnnnnnnnnnnnnnnnnnnnnnnnnnnnnnnnnnnnnnnnnnnnnnnnnnnnnnnnnnnnnnnnnnnnnnnnnnnnnnnnnnnnnnnnnnnnnnnnnnnnnnnnnnnnnnnnnnnnnnnnnnnnnnnnnnnnnnnnnnnnnnnnnnnnnnnnnnnnnnnnnnnnnnnnnnnnnnnnnnnnnnnnnnnnnnnnnnnnnnnnnnnnnnnnnnnnnnnnnnnnnnnnnnnnnnnnnnnnnnnnnnnnnnnnnnnnnnnnnnnnnnnnnnnnnnnnnnnnnnnnnnnnnnnnnnnnnnnnnnnnnnnnnnnnnnnnnnnnnnnnnnnnnnnnnnnnnnnnnnnnnnnnnnnnnnnnnnnnnnnnnnnnnnnnnnnnnnnnnnnnnnnnnnnnnnnnnnnnnnnnnnnnnnnnnnnnnnnnnnnnnnnnnnnnnnnnnnnnnnnnnnnnnnnnnnnnnnnnnnnnnnnnnnnnnnnnnnnnnnnnnnnnnnnnnnnnnnnnnnnnnnnnnnnnnnnnnnnnnnnnnnnnnnnnnnnnnnnnnnnnnnnnnnnnnnnnnnnnnnnnnnnnnnnnnnnnnnnnnnnnnnnnnnnnnnnnnnnnnnnnnnnnnnnnnnnnnnnnnnnnnnnnnnnnnnnnnnnnnnnnnnnnnnnnnnnnnnnnnnnnnnnnnnnnnnnnnnnnnnnnnnnnnnnnnnnnnnnnnnnnnnnnnnnnnnnnnnnnnnnnnnnnnnnnnnnnnnnnnnnnnnnnnnnnnnnnnnnnnnnnnnnnnnnnnnnnnnnnnnnnnnnnnnnnnnnnnnnnnnnnnnnnnnnnnnnnnnnnnnnnnnnnnnnnnnnnnnnnnnnnnnnnnnnnnnnnnnnnnnnnnnnnnnnnnnnnnnnnnnnnnnnnnnnnnnnnnnnnnnnnnnnnnnnnnnnnnnnnnnnnnnnnnnnnnnnnnnnnnnnnnnnnnnnnnnnnnnnnnnnnnnnnnnnnnnnnnnnnnnnnnnnnnnnnnnnnnnnnnnnnnnnnnnnnnnnnnnnnnnnnnnnnnnnnnnnnnnnnnnnnnnnnnnnnnnnnnnnnnnnnnnnnnnnnnnnnnnnnnnnnnnnnnnnnnnnnnnnnnnnnnnnnnnnnnnnnnnnnnnnnnnnnnnnnnnnnnnnnnnnnnnnnnnnnnnnnnnnnnnnnnnnnnnnnnnnnnnnnnnnnnnnnnnnnnnnnnnnnnnnnnnnnnnnnnnnnnnnnnnnnnnnnnnnnnnnnnnnnnnnnnnnnnnnnnnnnnnnnnnnnnnnnnnnnnnnnnnnnnnnnnnnnnnnnnnnnnnnnnnnnnnnnnnnnnnnnnnnnnnnnnnnnnnnnnnnnnnnnnnnnnnnnnnnnnnnnnnnnnnnnnnnnnnnnnnnnnnnnnnnnnnnnnnnnnnnnnnnnnnnnnnnnnnnnnnnnnnnnnnnnnnnnnnnnnnnnnnnnnnnnnnnnnnnnnnnnnnnnnnnnnnnnnnnnnnnnnnnnnnnnnnnnnnnnnnnnnnnnnnnnnnnnnnnnnnnnnnnnnnnnnnnnnnnnnnnnnnnnnnnnnnnnnnnnnnnnnnnnnnnnnnnnnnnnnnnnnnnnnnnnnnnnnnnnnnnnnnnnnnnnnnnnnnnnnnnnnnnnnnnnnnnnnnnnnnnnnnnnnnnnnnnnnnnnnnnnnnnnnnnnnnnnnnnnnnnnnnnnnnnnnnnnnnnnnnnnnnnnnnnnnnnnnnnnnnnnnnnnnnnnnnnnnnnnnnnnnnnnnnnnnnnnnnnnnnnnnnnnnnnnnnnnnnnnnnnnnnnnnnnnnnnnnnnnnnnnnnnnnnnnnnnnnnnnnnnnnnnnnnnnnnnnnnnnnnnnnnnnnncacacacacgctcacacacacacgcacacacacgcacacatacacactgcaacacacttgctccacacacacgaccacacacacacacacacacacacacacacacacacgcttgtgcacacacacgcacactggccatatccccatccctcagtgaatttggcaagaaggctgactctcacctatttgtcctggtccctggtaaacacctgactctaggctgttggccactctcctagcaaaatgagagtccaacagggaggaaccctgattcaagaaacagcaacccagacctttcttcaagggaacctggaaagaagaacaggataggggtagcctgccaccatgttcatgagaaggcctgttttaaagtttacctcaaggagtagaaagcagagccaggcttctgttcctcctgccaacctcagacagtggtcagacccaggtatctgaccattcccaccccagtgagatgccaagtggtagagccaggtaaacatggagagggcaccataagaatgcacacagtaggacagtcatagccactttggactgacagtgagacaggtgccccctgctctgtgggcctctatgccctgggctggttacctgtagctatgtcttccctgtagcggaggcaggtgccactgtatctgagtatatatcatcatcatattcagacagctcagctctctcctctggttccgctgaaaggaaaacttccagccctgtggagggcttctcaaggccatagccacagcaggtgctggctccccttgcctgagaatgaggcttcacgcctgcgtaagtgtgagacagaattcccactgaatcagcccggcttctcggcttctcccgcaccccagcaccactcccccgccctgctgccatcagcagggcccagcctacctgacctgatttcaccaactgaaatagtctgggtgctcacagcccgggacagttggaaatgtctctagaatgatctagcatcatctggaaggggctgatggcatttcccagccacggtgtggggtgtgggtccttaccctggaggcaagccctaggaagaaagcattcacaaccttagtaccaagagccagcggtctcagagaacgtctccagtcgttaaaggggcatctgggggcatattttgtgtgtgtgtgtgttgattagaacagactcaagagcattcttatggaattcttttttgtttgttaggtgacatcgaaccacagttacaacagcacatagaagtcttgatacgttgaccaccaggagagtttgaggcatatgtgacagccacctgatggtgtctgtgtttgcagtggctttactgtctctgtcctttatccaggggtctacagctaccctgtagacctacacagaaaggctgtgagacctagggctggccaatcaatgccttcataagtgcatgatcggtctgaaggagggccatgtgtaaagcagagccagtcacaaccccactccgacttttggggattggctagtaggagagaggggctccctgtcttcttctaggcccacatcattataaaagacagtagggcctgctagaagccacctttgctgtgttggtcagaggcccttgttatggtagagagtatacagtaggcgtatacactaggcagaagctagagagtatacagtaggcgtatacactaggcagaagctagagagtatacagtaggcgtatacactaggcagaagcttctttggcagagcagttctgacatcgtgtctttgccctgtgtttcccgtgactacgtctctggaccctgctcaaggaagcccactgaagccctgtgtgcccgttttcatttgcaaagattctgtcactgacaagtgaaacccataagtgtcatggttcagagcagagtgaagcattgaagtcaccaggagctgttattgggtgatgggtgtgggtcaaatgtaatggggaaagagccaggttttatgataagaaatgatatacagaaacccagccagtggctcagggctaacagatataagaaatccaaggcaagcaaccagtctttggcagaggccacaatcctttgttcacaccagtcttctgggataccttctcctacagacacaataatgaacaaagtaggtaactgccagagtccgagctctattctgtaacatcctggccagatgtggtatccatgtccccaaagactaaaccaacgccaccatccagatctaggaggtggccaaggtgaccagcttagagtccagcagttgcgtcccttgactggaaccttccagaaagaggaaatgtcaaagtctagggaaggctttggtagacaggatggctcgggagacttctcccagaaagccctgccacttattaaatgccttctgggtgccagatacatgacacatggcactcttgataccaaagagaacaggctgacttgatcagactaatgctaagccctggggagccctactccatgcttccttgagtagatatgagaaagcagaggtctgtctgagatccaagctaggtccccttttcccctcctgacaccatagcctagggaaggcagccagtgccacccaactctctgttccaactctgctccctcatactgagtaatagtgattcttctctgaggacaggagcctattatgtcaaaggggtctattgttacatgaatcagttctttttgtcaccagtcacagaaaccaacttcaagtagcttaacatccccaagtcttgaggattctaaagcattaagtcccaagagaaatgggaactagaacagtgggctcttctggggccagaaatgacctgatttgtgctagcatccctggtctctgagaagacctaagcttggagatcccctcccctctttactgttgatgcctctggcataaggaaagacttccatggggcttttgagcaggagcctccttccctgggcttccccaatgataatgacttggttgggacaacagctttctcctgggtgcaggtggcagggcctgggctgagatgtagagccagagcaatgaggagacacttgagtttctgtgggcaagtgaggaatacagacttgacaagcagtccaaaggagaaattccaggtgggaggaagtgaccagaatcacaggtgactacagacacacacgtacacgtatacacacacacacgtacacacacatacacacacatgcacacacacacatatgcacacacacatacatacattcacatacacacacgtacacacacacgtatacacacatgcacacacatgcacacacacacacacacacccatatgcacacacacacatacatacattcacatacacacacgtacacacacatgtacacacacacacgtacacacacgtacacacacatgcacacacatatacacatgtacacacgcacatacacacacatgcatgcatgcatgcacacacactcacgcacatacacacacgtacacacacatacacacatatacatacatgtacacacacgtacacacatacatacacacacgtacacatatgcacgcacacacatacgcacactcacacacatacacacacagcatagcacagtggtgtgaccttccatgcagcaacatagagaaaggaaacagtctaagactgggcagaggaacagcaaatgtcgacagtatagcccaccaaagtgaaatgtaccgtgagtcatacctagcacacgctggcatggagagatgtaggtaagaagtgagagagggaaactagcagacacacaaagcaaaggaaaggtgagctgggcaaacatcctcctttctactctcaaatcttgggtgaaaggatgagcatcagcctgggcgtctcaccgaagagatgcccagtcacttgtcatagagcagttatctgtccagttagcactcaacaactgagcacctcccataaaccaggtacaacccccgaggcatggcgtggacccctgtcctgtgagttcctggctaagggtcagtagatccttagcctgtgtcagatgacaagagaagtagggatgagtagggtgcggtgggggttaacgggggttgcttttgtaagcagacagtcagagggacccgactcaggagagttgggaggagaaccctggaggaagaaaaagtcggagtcagaaaaaaaaagaaaagaaaaagaaagaaaaaagaaaggagtgaattctagttgagcatttctttcctctttccaatataaaaaactgtatccaataactcattttagctcccaccagttacatggaagaatgtcagagccgctgatactggacagccatgagttgcccacatcccccatcccggacacacacactccccattacctacctctcccacatccatcccaactttacaaggggaaaaaaaaacttcctgccagcagttactaacagagtactttatccccagccctcccggaggtannnnnnnnnnnnnnnnnnnnataagaattgctgtctcttaatcttcaccaacactgatggttaaaatttttactctatagcagacagatgaaaaatgtagtttcattcattcaactactaccggtattaagtttgtgttctttggagattttcctgaggcaggatctccctacgtagctcaagctgacctaaaacttgcaacgaatcctctctgcctccgtctcagacttacagatctgaaccactgtgcacagccatttctacatacttattggcaatttttttgttttgaccagtagcccacctcttaatgtcctctatatttgtctatggtaggcttggtgctgttgttacaaatttgaacaactttatatatcactggttctcaaccttcctaatgccaggatccttcaatacggttcctcacagtgtggtggcaccaccaccaccataaaattattttattgtgacttcatagctgtgcaatcttgctactgttatgaattgttatataagtatctgatatgcaggatgtctgatatgtgacccctgtgaaagggtcgtttgaccccaaggttgagaactgctgctatatattaagcaattaccctccgtcctatttcctgatggcccgatatctccctcatcagtagctgtttcgtgcggcctctgctgcttccctgtaaagcccacctctctccacccagaagtgtgatttcactccacttcactctcttcaggtttttatttttctcagttggctttttactcctcctagagttcaccggagggtgcgggatgaagggcaactgtagattctttcctccctgatatcggacagctgtggtcctgatgctgtatctcctctacctctgatttgtggccctctggggatcatatgataaacccttgtggatgccaaatttgcttctggggtgtctgatctagctctccatgcttggtcagtcccatggccttttaattattaaggctttggaataaattaaaagtaatacagcccttttccaatttttgttgtgtcttgactaggggacttttccttattattctttcaaattannnnnnnnnnnnnnnnnnnntcatacctagcacacgctggcatggagagatgtaggtaagaagtgagagagggaaactagcagacacacaaagcaaaggaaaggtgagctgggcaaacatcctcctttctactctcaaatcttgggtgaaaggatgagcatcagcctgggcgtctcaccgaagagatgcccagtcacttgtcatagagcagttatctgtccagttagcactcaacaactgagcacctcccataaaccaggtacaacccccgaggcatggcgtggacccctgtcctgtgagttcctggctaagggtcagtagatccttagcccgtgtcagatgacaagagaagtagggatgagcagggtgcggtgggggttaacgggggttgcttttgtaagcagacagtcagagggacccgactcaggagagttgggaggagaaccctggaagaagaaaaagtcggagtcagaaaaaaaaagaaaagaaaaagaaagaaaaaagaaaggagtgaattctagttgagcatttctttcctctttccaatataaaaaactgtatccaataactcattttagctcccaccagttacatggaagaatgtcagagccgctgatgctggacagccccgagttgcccacatcccccatcccggacacacacactccccattacctacctctcccacatccatcccaactttacaaggggaaaaaaaaacttcctgccagcagttactaacagagtactttatccccagccctcccggaggtagggggtgtggccgcgaggctgcagtatacctcggaacagaagcactttagccactggggaagtccagtttggatgggcagctctcccttggtcaattgttttttaaaaagtgagaccagtgtgcagggtgcagggttgtctgtcagcctcaggaagtgcaaaaatatactgtggtccttacgccagccacccccacccccacccctgtccccgctacagcatcatcgtcctgctgtggctggcctgcccacaggggtcgagtgggtaggggaactgtgttttccccccactctgcctgtacacagctgtttttggcttggccacagaattctaccacaccagagttcatgtggttatccagagtgggaagaatttcccagaatgccttgagaaacctgagacactgaatggctttcagggcttattgatgtggctgtgcgcaggaaatagcagtacgtcaataaatagttttaggcaggaaaccgggcttaaatggtagccttggagtttggggaaaggcaccaggggttgctgggagggagcctgcctgtcagatgagaacctagagccaaatagcagactttgaaataactgcccctgagctgagaggccccttgctgctcttggatgtaagaggctgaggttaggggcagagtcaagacccaaggacaggcctgtctcagctggcagaaaggggctctttgtgtaaagagggaagctggcaacttctaacacttgtcaggaagagacacacagcctgtaggtgaggtgtcaggaggagacacacaggcgaggctccggcctctaggtgaggcctgttcacaccccatctggtagaaatcagtgaatcagtgccagctgccaatcaccccaagacttccactgtcctacttttaaaaggagaaaggggggaggggtcaaggaaagcaaccatcacactcagtacctgtttttctggttatgaaaagaaatgattatagaaatttagaaaaagccataaatacaagaaagaataaaggccactcccagttccaccttttggaagccaccatattaaacatttttgaacagtccttttaaaagctgtatctgtggataataatatatactatctgttttcatttagtgttagacaaacattgtctcgtacttctatacatttttttataaatttctttttcctttttctttcttttttcctgtttgtttgtttgtttgtttgtttgtttgtttgtttgaaacagggtctctgtaacagtggctgtcctagaatgtactctgtagactaggctggccttgaactcacagtgctgggatcaaaggtatagaccagacaagccaaacctcgtggtcatcactgattcaaccattgtctgactggctgctcagactcttgactcttgactttttatgttaagcctgtttcaaggtatctttacattcagtttatgtgtgctcacacacatgcacgtgtcgtagcttgtatgtgaaggtcagagggcagctcgtaggaaacatcgctttccttccaccatgtggaatcgaacttagatagtcagacttggaggcaagctcctttgctccatgagccctcttgttggcccctgaagaatacttttcccgtcctcattattacttcatgatagacacccagaggtgcaattgccagacgactgttaaggttaattaaggttcctcaggaaaaatgtatactgcccatatataagaaaaatgtatactgcccatatataagaattgctcttaatcttcaccaacactgatggttaaaatttttactctatagcagacagatgaaagtgtagtttcattcatttaactactaccagtattaagtttgtgttctttggagattttcctgaggcaggatctccctatgtagctcaagctgacctaaaacttgcaacgaatcttctctgcctctgtctcagacttacagatctgaaccactgtgcacagccatttctacatacttattggcaattttttgttttgaccagtagcccacctcttaatgtcctctatatttgtctatggtaggcttggtgctgttgttacaaatttgaacatcctatatatcactggttcttaaccttcctaatgccaggatccttcaatactgttcctcactggtgtggtggcaccaccaccaccaccaccaccaccataaaattattttattgtgacttcatagctgtgcaatcttgctactgttatgaattgttatataagtatctgatatgcaggatatctgatatgtgacccctgtgaaagggtcgtttgaccccaaggttgagaactgctgctatatattaagcaattaccctccgtcctatttcctgatggcctgatatctccctcatcagtagctgttttgtgcggcctctgctgcttccctgtaaagcccacctctctccacccagaagtgtgatttcactccacttcactctcttcaggtttttatttttctcagttggctttttactcctcctagagttcaccgtagggtgcgggatgaagggcaactgtagattctttcctccctgatatcggaaagccgtggtcctgatgctgtatctcctctacctctgatttgtggccctctggggatcatatgataaacccttgtggatgccaaatttgcttctgggctgtctgatctagctctccatgcttggtcagtcccatggccttttaattattaaggctttggaataaattaaaagtaatacagccctttccaatttttgttgtgtcttgactagggacttttccttattattctttcaagttacttttaaggtcattttttttaatcaagtctttatatccattgcccttgctccctcacacacagacagacagacagacagacagacagacacacacacacacaagctcatgttaggcttttataaattagtttttgatcattaaaacatctcactggtaaattgtgtcaggaaagcaagctgttgactttattatatattaatttaatatctagatactcatattaattagttactaaaccctgattaatctttattagaggttctcttgggtttttcatacatataatctaataattttctctctccttccacccatgggcattgccactgtttttcagtcagacccctcgatgtaatagattgcatttatagatttcctgatgctaaatcattacagccttcctgggatgaaagtgtacttgttataatgggtctactcgctggcatttcatttaggactgccccatccatccacattagagaggtcagccagtgcgcttccttgtttatgactgactgcgagatgtcgcctgtaaatgaccagctggcaagcccccctttcctgagccttttgggttcgtttccaaatgacaacaattatctcgcttttcaaataagcttggatgaatttccctattaaaaagtcataactttagagacctccctataaaggtaattctttcataatttgattttagttcatgtcttttcatccttcctggtcttgagttcttcccttttttttcagtaacgtagatgatatttatttttctgaagcattcgctgcatgcgtctttcgactttaacagagtcagatttgaccctgccttaccttcttccatattggttttcatagtaaatcttttctaatccttccttctggcttttgtatgcaattttctttttttattttctaattaatttccagttttgtctatattgtgttctttcctctatcttctttagctaatgatggttttctaattcctttggagagagttttggataacacagtctgctagaagtacaacgtagcctcctcacacacttctaaatggaattagaggttctacttcatctagtatatccaaaatttcagcacagactcaactttttaaaaatatttgttttatgcgcacatgcgtaagtgtggatacacacatgtgggtgaagatgactgtgatggcatcagattcccatggagctggggctaccggcagttgtgagccaccaaatggggctggaggtgtactcagattctctgcaagagttattaactgctgagctatctctctggccctacccaaccctttttaaatgacaggttttacattcttttttccatactgtgtcctcaaaaccattgtcacttcataagtaaacacactgttcagtgagcccctttaagcattcagcgtccacacgtgactagtagctatcacactggagaacatgggttagcacgccgagttctcttcttttgtttaatacccagcagtcagttgaatagtcagtaaacatgttgacctctcagtgtagcttgaaccacatcccacaagtgttttgttgatggtggcttggtttttggtttttgtttttgtttttgagacaggatctctttaagtagccttccctagctgtcctggaacactctatgtagactaggctggccttgaattcacagagaactgtctgcttctgacactacatcgggtgacaatgttatgtttgagaaattatagtagaatcaattctctatgtgaattgtcctaatttagatgtattaattatattactcaaatcaccaaagtaattcatcctgggccatgtactttgccagagacatcattgccttaacatcccagtgtaatgtgttccaggttctccttgcctcaatagctttcgctacattttgagtctgtcctgttatctatttattataaattgtattttatctttgtatgtaattatagctttatcttttttttaaaaacccactgattttattactaatttagttctcttcgtgtttgtccatagctaatttgacttgctcattatttaatataccctgttttcagtatgctactggttcctaatgtttatctttttaacgcacagtttttacatttatttattgttgggggcagagcacacacatgccacagtgtgcacgtggaagtcagaagatcacctgccaggctccattctgtccttccaacctgcagatctcaggggttgaacgtggttgcaaatgtctttcacccactgagtcatcttgccgatccagttttaatattcttcaaacacagttttactgtcttcaaatgctgtcttcaaaaatcagtatttctctgattagcaagctaagggaaaaacgattgacataagaatcttcagggtataagttaggaagtgaaggtcaccttttagtcttccattcgttcactgtctaacggtcttagccagtcctttgtaattggattttgaattattaactaactactactatggaattattatttatgttgaattttaaaaattagaattgagccaaccattggtggcacatgcttttaatcccagcactcaggaggcagaggcagtcagatctgtgagtccaaggccaacctgatctacagagcaagttccaggatagccagggctacacagagaaaccctatctcaataaggttaaaaaaaaaaaagccaaaatgaattttttaaataaaaattgaatatcttctcatctaaaaatttttcctggcttttgattaactctttaaaaaacaccctttaactggcttatttggacttaacgaagttaagtctgcctggtttcaatttcccctcctgttcttctatggcatgattccctctgaagtgaggtatatattttgccggctggaacattcattcaagaaagttttaatttttttttttgcttttaataagataatataaaaattgccatttcaactaccttcagtgcaccacttgacaatgtaaaatgttaaatacacattgttggacagacttcccccaaaacctcttcttcttacaaagctgagaccctgctgaccccgtgcctcctttctcagcacttggcggtttctgttctgcttcctgcaatgtcccctgactgcctgaggcccttgtctgcatctcagaatcctagccttcatcaagactgatttacagttaggaacactcctacttttgagctgccataatcagtttaccagaattggctgacggcaatgaacctcttgtgaaggtagttcagggtaaacatgctttatcatggccccttgtgtattgcctggtccatagcacaatgatattcttaaaagaagaattaataaacagatggatggatggatgcatgcatggatggatgcatgtatggatgcatggatgcatggatggatgcataggtggatgcatggatggatgaacagacaggcagatgaatggatggattaatggatggatggatgggtggatggatggatagatggatgggtggatgaatggatagatggaatggatggatgaatggatagatggaatggatggatgaatgaatgaacgaacggacggacggacagatggacggatggatggatggatggatggatggatggatggatggatggatggatgactgagtgaatgaacaggcagacagatggacagatggatgggtagacgggtggacagagagatggatagacagacagatggatagataagtgagtgagttcatgaagactttagattctcctggtgggtggacatgctggctcaacactggccatgaaagcctggtgacctgagtctgacccctccaagccaggtgtaaggggaaggcgagaactaactccacagtcatcccctgacctccacaccatggcacatacaccgcacacacatgcgcacacaccaaatattaataaattaacagtgttttctattatgtgctaggcagtagtgagcaggagttgtacttctgctttgagcctagcacaagggctaaagtgggccttagttgtagactgcagatctgtatgggccagtggcattctccttcactccctgagaggatggtgatttgagagtcagacaaaggaggtgaactgaactgaacttagagataatgaatgtgagaaaggtgccattcccaacacacacacacacacacacacacacacacacacacacacacacacactcacctcaacgaccaccatatacatccccagcccatagtcttagggacatccagcccaggctgagagacatctgtgaaggaggaagatggccaagtcagagcaactcacagaagaggagcttgtcccccaacccagggtaaccggaagtggtggttcctagcctcattttaaacccaagtccgcccttgtgctgtgctgggatcctgggacccagctggtgctgcccgggcccctcccagcccctcccagccccagtgaggttgacgttctcttgtgcctccacagaaggacttcactgtgcgggaggagctgcagcaacaggatgtggagcgctggctgggcttcatcaccttcctgtgtgaggtgttcggcaccatgcggagcagcactggcgagcccttccgagtgctggtgtgccccatctacacgtgcctccgggaggtaagagcaaagtgtgccccatctacacgtgcctccgggaggtaagagcaaagtgtgccccgtctacgcgtgcctctaggaggtaagagcaaaggctgcgcatgacctcggtactgccctgcccacctgtcggtactaaaggaagccctgcgcatataccttggagagagacacaggagagcaatggagttgggttacagatacaagaatgacttccccatgccttaagaaataagccttgactcagacttcagtaatcttaaattttagttgaagaggtttacggtgttatatcactgaatggatctttggacttggttggtttaccactgatttttttttcctttaatgttttgcttctaaaatttaactttaaaagtaataaatagggggtggtgtgatggctcagcagataagagcactcactgctctaaagattcaggtttaagttcagttccaagcacccacgtggggcagttcacaaccacgtgtaactccagtgccctcttgtggcctctctgggcactgccacgggcagtgtgcacaaactcatcgtacatataagaataaaagtttttaaaataataaaataagagaagccaagagactttggagacgggagtttggggtgcttgctccttcacacataaaagctcactctgaaaggtcatctgtggctggttgggggacagaagtagacactgggaagccgactggaagccaggtagcagggaaacatcccagctcccactaggagggatcgagccaagggtggggctctagcatccttaagagcagcagccttcaggattggctgataggggatggaagggagggagataggatggaggtcctatttcccagccacatggccacatcccctgggatgtgagactcagaaagaaaatcactgtggggatgagagccaggaattaggcctctggacatctatttgggtcacttgttgactctcctcaaaggcagtcctgagggtagttggcagaaagatctaaagtgccacgaagggccccatggggagtaaggaaactacttctgtcaggcatgtatgggcacctgaggctaaaggcaagacaagggtgatattacccagtaagagagaacaaacagggagatggtacagtcatgtgtagaggagagaggaagaggaggtaagtcgggatttgacgcctccagagagctccagaagagcaagtgaaaggcatgccagcatccttcagagggggctggtactagtcctgactccacccatcccagtcctgactccacccatccctgtcctctccttccctggcagcccttagcttccaccaggacacggggaagggatgggtgaagaaccaaaggtcctcgatggagaagtggcaagaagaggggtcctggagctctggcagagagaccagcagtgtgggcaggtacttcagaccatgttctgaaaaaaaaaagctatgagaaaaatggactgaaaggaaaggagcagcatcaagaggcatgcttagtttttaattgactataataagcagtgtgaacaaaatgagaatgcgcttgtgtttggcgagcatcccctaataggacggtggtatgctcatcccagcctaaagcagagcttacatcccctcgggtcacttttgaacccacagcactgagctgctctatgctggtggtctctgtttccttatgaatatgcttgactttagagatgcctcagtcatccagttcacagccacccctgacttgattttactcttcggggggcctcagttcagaggaccacgggcagcttggccttttgtgtcccttcggagtgagcagaaagtgcccccttctcagaggctcactcctttccacgtggccatgagccacctccacataagggacagtgacctggggctgtgacctggatttcccgattccttctgcatgatctgggcccctcctcctgctgttgtcacctgctcctccagcaggaagcaggactgttgggagtgctggccctggctgctgggagatttttcacaccacctaaggtagtgcaaactctgtggtgtgagatccggaaggtgccaagaggtctgtataggcggggagcagtgagtgaggccttcctctgtgcacacttgttgaatgagttaagttttgcaggagggacattttgacaagcacagaaccacactgctctcatggtcaacttgagtggtgagccatctatctgtctgtctatctatctatgcctttccgcattttgtacaaaaggaaatcagagagccactactagggtccagctacccgctgccttgcagtcacattcgcccaggttttggctgtaccctcttggggaagaaatagggcactctgggcttttctcaattgcaaaaaaaaaaaaaaaaaagtctcacagcactacagcactttgagtgaggaaaaaacatttaaaggaggaaaaattgtgattttagaaggttcagtccatggtcatctggctctgttgtttttgagcctgtggtgagccagaagcatcacggaggaaggggcatgaagaagtaaaactgcttaccctgtggcagccaggaagcaaaaagaataagaaagaggaaggcgccaagatggagacatacatgtgtgtgtgttttcccatgtgccttctcgacttcctcttcacatcctgtgtttgcttaacatgttcttttcagcttactctcttcggataggagatggtactgtgggtaaagcacttgcaaattcaaggactggagttcagattcctcacacccatttcaaagcagatgtggcacagctgtaacccagtgccggggaggcagagatggggttccctggagccagctggttagagctagactagccaagtccgcaagctctaggtctattgagagatcctgcctcagttaacaagatgggaagtaatcaagaaagacacccaacatcaacccctgacctccacatacatactcgcatgcatgtgcacacacatatacatacatgcacaacacacatatgtacacacacacatgcacacgtgaaaaaaattaacatcataatgctgacatttacaggagatcttccttcttaacagatccttaaatgtaaatatggtggtattttctatgtacggaacacagagcagacctccagactcatttatctacccaactgcagcatttatacccactggtgagcaaagagctcccacttcacctccctcagccttctgaaaccatctctccgttctctgactcagtcaatttgatgatcttaggcacctgatgaattagcatggtttctgttcctaccataccagatgttgaatgttttgtctttaaaaaaaaaaaaaaaaaggaagatttatttatgtatttatttagcttacagtttgggaggctacaagtccaaactccatggtaccaggtcctgaaactccatcatgccatagtgggtggcacataagaaagatcacagaacagtgacagggagccagggagtgatgcagaggtcagtggtcaggcctgctctttttatgacaactggagaactcgccacagtgttcaccccttaggggatagtctcacacacacacacacacacacacacacatacacacacaggatctgatttcttctcattatgcctccctcttctgaaaggttctatgctgactcccaacactgccacactaaagcccaagcttccaacacacaaactcttaaagaacaaactactccagaccatagcacctgataggactggagccatgcagtagtaattactctccttggctggcttgtttgactgagtgtaatatcctttaggctcatccacatagctggtattaagggatttgaccttttgaacactggataaatgttcaagtctgtatgcgcaccatgtcttctgcactcaggcactgatggccagtccaattgtttgtcaccatatggttcttgtgaccactactgcggtgaacatcggaatgggtgcagaaatgtctggaaaccatgatttcgggtcatctaaataaacccagggatgtggttctgtttagaatctgctgagcctgggtacagttctctacagccttattttacattccacaaacatcatacaggggttcctggtttgctgcagcctcaccagtccctgttttgtgatcataggtactaatgaaatagctcactgtttggattaacattttcctagtggctgatattgaatatctcctcctatacctgccagccatctgccatgagttcttgggtgaaatgtctattcaaaccctttacctactttctggctctgttcctaggttttctgccattgagtcctagaaatgtcatagaccagtggttctcaacctgtaggtttcaggcctctttggtgactgaatgaccctttcacaggaattgcctaagaccaccagataacacagatatttacgttacaattcataacagtagcaaaaaaaaatacagttatgaagtagcaatgaaaatagttttatggttgggggtcagtagagcatgatctgtattaaagggtcgcagcatcaggaaggttgagaactgctgccttagatgatttgggcattgccactttacttgatgtctggtctataatattccctcccattgcatgggctgtctctcacttggatcatctcctttcctgtgcagaagggtttggggttgacgtaagtctacttggctggttttgcttcacagcctatatttgtagttacacctcaaacccaaggctgggtccatgtcaaacatctggtcaccgtgttttccaatagttttatggtttcagagtcttgccggtgtttaatctatgttattactcatatagagtgaggtagggtccagtttcattcttctgtatgtgggattccccaacaccgcttactgagagactgtctttcccctttgttgaggctcagtcagtatgtaactttattcccattcatgcatctagaagtctgtttttatgccaggatcatgctgtttggttactgtagctttgtaatatattctgaagtcagggtccatggcacctttaattttgttctctggccaatattgctttagtcattttggggcttttttgtggttccatttgaattttagaatttttaaactatttctgtaaaattgagaggctgtgagtcttatatagattgtgttgaatctttgcagcgttgtggttgcttggtgtagacatttgcgagatactaaaccttccgatccaagatcacagtcaaggatactcgctatatattcatattaagcatagttctagaagtcaccagaagaatgagataggaaacatgaataaaaggcaccctcatccaaaaggaagacgggaaactgtccctatttacaggcaacatgatcttatatatataaaacatttagttgggcatggtggctctctctggtgatcttaactctggacaagctaagacagtagaatcatgagttccaggacagctcagacgatagagcaagactgaatcaaaaaattctgtagatatccttcaaaaaactgtctcaagccaggcatggtggcacacaccattagtcccagtactcaaaggcaagtggatctctgtaagtttgaggccagcctgatctacataacaaattccagaccacccaaggctgcatggcgagacttcatctctaaataaataaataaaataaaataaacaaattcaataaagtcccatgatgcaaaaccaacttgcctttctacatactgataatgaactatgcaggaaggaaattaaggccacaatcccatttacaatcccattcaaaagattaaaatgcctggactaaacttaactcatagtaaagtaaaagatttacacactgagaactataaaacattgtaaaaagactctagaagtcacaacttgtaagacaccccattagccttaacagaactctcagtgtacagtcacctagcccaggaccttaggcaaagtgactgggagggctccacactcgggaacttccagcgactgacccgactgaccgagttggagtatggcagggtctcccccgtggcagctggcttctctgggccagcctggcccagctgggtctggttggtcctgcacctttcagctatgaccttcaaggctcactattcagcccctctgtgccaccaatcaccttctggcctcaggagcgtgttttctagactcccttgggtgattattaaacgcctcccgctgggccccttacttgaagggcttgattggaaattcctgtggcaggggaatttttcaacaaagctttgtgcctgcagtctcctcacttccttccctcccccaaacatcctaccttccctctctcatccccagcctatctctattggtaactcacctcctgccctcctcagaatcctgcagccacagacacaggtcaggagtggagcaaaggagttgaggcagggattggggggcactctgcctggaatccttcatacctgtagtacccctcagcttgtcccctccacctgtccctccatgcgtggtggccccgaggggtctgcctgtgaagagagagccctcacagaccagcaagcagcaagctgggctgccagaggaggcagacaggcacagtggggggaacagagggcagtaagtcaggctcctcaggaaatgaaactgctctgtgcaacaatgagggagacactctctgaactttgtgcgtgagtgagcattcgattgctcgcattgttttggctccggggaaatctgacctcgggaaaggccgagctgaggtgggtgtgggtagtaatgcaggatattcctcaagggcaccttgccaggaggacctgacttcccagagcagggggaggggtctgcttggcagcctagctggggccaaaagaagcccaaggtaggctgggctctgggctcccctcggggaggggagatttattggctggatccatgggaaatgatcttcaccctgcacctctggaaggtttacaaaatggctaattcccaaatcagcccttgaccctctccctcacccagtaaaaccaaacttcctggggatggatggggttgggctgtggggatggaagctttccaagttgattctgggctgtggccatggttaagtgacaggagcccccccccccccattccaggtgcgtttagtgagccgctactgaccaggcaggagcatccatctctcgggagcacctggccttaggcactgagacccaagttcaaatctcagcagctgaacttcctgacaggcattcaggaaaagcaagtgatacgtagcagccctactgtgcgtggcccattgtattgtgctgctgtgatgtagcatgtgtctcaggcgtgactcaagaagagtcttacctcaggaggccactaagggagaccatgttctgggcatccagatccccagagtcagacgtgatacccctgccggacaccctcccccaggtgtacatgggtaaacttgtatccttcctgtcttagctcttcctcacaccctccctccatggtgagggacttgggggggggggtgcctcaaattcataatcccttgctgcagtctccagggtgctgggattagaggcatgtgccaccgagcctggcagtttgcagttcttatagagtactgaagagctaacttctgcccgaggctgtcagcgtccaccctctgtctggcatgttgttgtggtaatggcttgtgaccccttcctgagtacttcaaatcatttcgtccttctgttggtacttagaggctaaggttcacccatcacaaaaaccctaggattctattctctttcttgacttttttggtgtttgtttgtttatgtcagggtctcatgtaagcccatgtaggtcttagtgcctctaaatcactaagtagctaagagtgaccccatactgtgggtcctcctgtttccatctctcttgagtgctgggatcacaggcttgccccaccacttcaggttgtgtgcatgcaagcagagaagtggtctgactgcagttctcctgtgagccccaggaagaaacattgttgcgatccccaccccctttcaacgtggcaaccgcatctgcagaaatgacatagcccagtgggttgggaactcagtgactatgggggaaagagggtagagggggagcaaggaacagctggggacaaagaggaggcacttaccagacccacgctggtgtatgcaagatgacatccaagagtgtctagaagccttaagcctgaaagcaataccagtaactagagcgatgtattctttcaactagcaacaagaaaaaatgctacttccttactggactaaaatgccctgagacaacaaagtcaccaaagtttggagacagaggatcccagggaactcaagcactgtgggaaatgtagccctgcagattcagagtaagggacatgactggggaagggaatggtggagccctagagccttctgagcagaaactgggtcctagcccctcactgttgtgggaagtgtttgtagtgtaagagtcggacagggcatgaagggaggaaaggaagcctgtaaaaccaggaggctctttctccttgaacagtttcttttcacctttaatcttgagtccagaatcttagcagaatgtttctctgagcatgcagccaccccaggctgggtacccaaagccctgagctcttagtttagcatcggagtccctacaggttccaaggctcaagttatgaaaggttcaacccttcctggaaccctgctaaagtaacccacacaggtttagtaccccccccccccacccacccgtgtgtgnnnnnnnnnnnnnnnnnnnntcgctcgtggtgtgataccgacctgtgcagaacacaccaccgccaccatgcatccacatccgcatgcgcatgcagaggcagtgcctttgaggcagcttcacaatccagcaggagttcccacccagcccaccagcctttcctcccccacccccaccccataacagttctgcttccttagccaggctgagcacactgacatgtgaaatttgaagccagtgttccccttagcaaccatggtaacacaggatctgatagagagcctgcagttataaaaataccagcttccaccagacactggtttccaaagggaaaccagtccccacaccagaaccatttttaaacagtcttcagacttcagagatggccagcatgctcctagtgcagtgtggctgccggagactgtcacagggggctggctggcttatagtaggcagcgttgggtatgttctttgaagcacagaatggcctgtgattcggcaaacaatgaactagccctatcaagggtacattggtgatggtcattttcctgattggaccaactcttttggcatttttaagtcagggtgagatgcagagattctgggaccctgtccttccgggtcccttctggagagttctcagctccttatcacctgggggacaatgacttggtctttcttctttttgtggaagtcaataagggctctcatagggaggggagagatggtgtggctaaaaacttttccacttacaatcaggaaaagccctgcatcttgtacccagttctgagcaggctgcagtcttcgttcctagtctgtgttctcagtaggaggcattagccttgagatgaagcaggggcctgggtatgtgctcacccagcctctggcctgttctcctctgagccccgcctccccatctcagtaacagcctcccctgccctccctctcctgttcctcccagccttttgtctcccggggctatgccttgtaatttgaaaaatattctaacttggtaattaatgtctgaacttggagagcgcccccatcctgcttctgcctagctagctgaaggcgggccaagatgcaaattcagagaagctaaaaggaggcatgggattttccaagatggtcccttagttttgggggagggggttaaaaaaaccacacatgagttgcccttgaacctcccccccccccccaccttggccatttcccaacaggccgatggcagagtcttcagctccacaaatttgggaacactcaagtactagacagggccactctctgagagcagttcacagagaaattatctgaggtggggggagagagagagagaaagagagaaagagagagaacatacaagcaagcaaactatgtgtgtgtgtgtgtgtttgtatgtgtgtgtgtgtatgtgtgtgtgtatgtgtgtgtatgtgtgtgtgtgtgtatgtgtatatatatatatatatatatatatatatatatatatatatatagagagagagagagagagagagagagagagagaccaaaaggaagattggagagcattagctgctcttccagaggacctgggtttgattcccaactcatggtggctcacagccacctgtaactccagtcccaggggatccaatgccctctcctggcctccatgggcaccaggcaggcaaacaaaacactctaaaggagaaggaagacatagagaatagctactcgggaggctgaggcaggaacaccagaagctcaacccttggttacagagtgcgttcaaggcaaggttggacaactcaggaagaccctgtctcaagataaaaggtaaagagggtgtagcatgagaaagatctgggttctggggtcaaggagaagaaaggagggcaagggaggagggggatggaggaggaggagggaagaggaaggtgtcatgagtctattatgttagaaacatacatggctatgtttgtgtctttccagtttgttaaactgaataaaacatatccataagctacatattggctacaatttgccacatagttctaatttcacttaactaaccattagcaatattggtttctcttattccaacttttaaaaaagttttctagatttctttattttacttcatgtgtgtgaatgttttgactgcattcatatatgaattcctcatgcgtgcctgttggatttcctggggttgggtcatgatggttgtgagacacgatgtgggtgctgggaatcaaaccaggtcctctgcaagagcaagtgctcttcttaactctggagtcatccctccagcccttactttattagttgttaatatcaactctcaggtcatacattatcgagagagagagagaagagttaagctgtttgggccccagagttattcagtcagtctcagagatgcctcttcaaaggccaatctgaagtaggctgagtgtcaggggcaggagaagagcagtcaagcctgacacagaggcaggagccctttgctgtgtggttctcctggccatggcttgcggtgtgcgagtaggtgaccagtcggcatcccaggcacactgcagactccaggagtgcctcctctacactctcaggcgaggggtggtacatctgggtaactgacaagctcgcgcgcttggtgtttctcatatcaatctaatgcagtttcaggctgttattgatcggcacaacgaattatttatacatttgtacttctcgctgttttggcaagtggtagtgacttgtttgtgtaaacaagatgtggagttgttctttcacttgatacttatacccaaaatgcagcgactcctgtactgttgctctatgggggagtgggggtggggaggagtcactgtgggctgggcacagcccgaaggaacaccatggcctgaagtaggcccagccagttgtctaggacagaaaacctgacgcttgctctaggacctggaagtgcctgaagcacaggagacatgcatgccacaacccgtgatgttctcagccttcagtggctctgcagaccccagagttcacagttagcctggctgattgatgctactccatttccatcagccccaccgtgggtcagaaacggctttgggagtgtgtgtcctcctagaagagaaacccagaaatcacaccccttccttctgtctacttagacgcagctagaacccaggtcctttttgataggtctgggtcagtagacacaggaccgagacttctaggcctaagccaagccctagaagaggaagcctaaaggagaggcccgttcttggcaagaggggcgcttagaaaaaaaggtggtttggaagctgacgaactaacaccttcccctctctggccttcaggcttctttgtcaggaggcaccggataaaatggtttgctcattacaagctaacttcctctctacagctccctgtctgtccctctacagctctgacaagtgaagacagggaataagggtccctttaggtgtgtaagacaaagtgtctcttaggaagaaaaactaaggagagggaagctagtaaaacaagcctttgcacacacagtgtgcctgctcttgcacacacagtgtgcctcctgctctccagacactctgagctctgtttagatttcagttcctcagaagggtcccaaggactcgtccgtcattccccagttggctacctgtccctgtcctcagcctgccttctttctcttcatgacaatacttgctgttacctcgagtcttctttgtcaatctgttttttttttctaccgtgggaactctagaggcaggaaatgtatctattcatagctccgttcccagtggtgtctgacatacggtaggtactcaataaacacttattgaagaaactaacgaaataacttgtctagaccgagcgaactgaagacaatggtcagtcagtcagtcaatcagcctttcataaagaactgggggtgggggtggggcaggggagaagtgctgggggggttggnnnnnnnnnnnnnnnnnnnnnnnnnnnnnnnnnnnnnnnnnnnnnnnnnnnnnnnnnnnnnnnnnnnnnnnnnnnnnnnnnnnnnnnnnnnnnnnnnnnnnnnnnnnnnnnnnnnnnnnnnnnnnnnnnnnnnnnnnnnnnnnnnnnnnnnnnnntggggcaggggggggagcttgtcagaaagaagtgcaggatcctcaaggaggcccagtgagaggcacagcaggctggtctttcctctgcatccgtccatatgcttcctggaaggtgcagatttaattcacctgcccagagtcaggatcccataagccagcatcctcaggtgagaacagaggggttccagcaaagcttccaggagcctccagggaggacacccccaaccccacctgctgctatcagctacacaggacaatccaaggggacatcagccaaaaccctctgtcactaccataaagaggaatgagagggaggaccccaggctcagagggagtaccccaggctcaggagggcccctggggatcaaggatagaggagggtaaagcagagcgggaaggtggagcggctggggtggaacgctatagtggccgctgagaagcccagtagttctttccagtccagcagagtctcagccacagaaccgtggccggggttgccatacgtgaagccacatctgcagttttcaacttttgtccgttgtttttgtttattgttgatttgtttctgtgacagggcttcttgtagccctggctgtcctggaactcactctgtagtccaggctggcctcgaactcacagagatcagcctgcctctgcctctgcctctgcctctgcctctgcctctgcctctgcctctgcctctgcctctgcctctgcctctgcctctgcctctgcctctgcctctgcctctgcctctgcctctgcctctgcctctgcctctgcctctgcctctgcctctgcctctgcctctgcctccacctcctgaaggctgggtgtacaccaggaccttctggcttgcaactttcaatcttctggtagccacatttaaagccccccaaggcgtagggagtgtgtgtgtgtaaaatatttttttatcaatggtatccaaataattataattacatcaccatgtaaccaatagtaaaaagtaccaataaaaaatttttgttgccattgggttttttttgttccccagacagagcctggctctgtagcccaggctagtctggctctgtagcttaggctggtctcaaactctctgtgctcctgcttcagcctgagagctaaaaatcactgcagcaatccatatttttttatattcgtgtgtttgtgtgtgtgtgtgtgtgaactaagtcagtgtttgaaacttggtgtacatttcaccatgccggcaccactcagttcgggccagacaccttgtaagttctcagaccacacgtggctgctggctacggtagggaggctaggtaggtgtcatcaggctcttggaacagttctggatgctggaagtcccacaagtactgtttgcagcttccatctctctcaacacccagcagaaatggggagccataagagctgaaccccaaggctcacagccagctcctggtggggtctatgaaaagcaggtcttcaatccctgatggacaaagcaggcggggggtggagaggggggcaggagtataggaagggagaagggccctggctggggtggcagcacatgagagggctcagaggagaacccacggtggggatcagtgccagggcctccctagagtgcccggcatgaagaaggcacaatcggcccattctttcactgccctccggactacttagggcgaccatttctgtaattaagactttctccctttctcagaggtattaaaacatagaagtatttactgcatctggtttcccagggttgaaagctagctagacttaggaagtgcaaacactctttggaaatgcaaacacacttgcaggaacgaattctctttgaatcaaggctgaagccctccttaaaacaattagtcctgagaccagaaccttaggtacaactcccctttgtttggttgtgtggcccgccaccactaccttcacccatagggggatatgaccagtcctcggggcccagggacaggaagggaatgaattggtctgctacttctgggtctgggctggcctgcgttccgcttggtttggaaatgttagtcagaggagagtttgaggtgtggggaagggcagggaggatgtggtttgggcaaggggagtccagaggcttccctgggcttggcccagtgccatgggaagtctcagaacctctgccggccacactgaagtgccctgcctggctggagctgagggcgtggccaaggattagctgactggagagcaattagatgaggtggggctggggaaatacctggaaccccagggatagagtcaagacttgcttggctaaccctgaaggccggaggccttggggggcctggggagttaagtgtggcctcttgctgatgggcagaaggggattataatgtcagggatcagggagtctacagcactctgagaaagaggcttttttcttgatgaccagttgctaaatacctcttccacctgctcacattcctgcccagacctgtggattttcctgtcatagccgcatgggcttgggaggtgtggtatgaagtgacccttctggggatattcatctagggggaaggagaagtgagaaaaatgggtgccttgaaggaaaggggtgctcatctatttgaaaggtgtgggcaagccctgccaagactgttgcccagaaaacccccacaaacattacagcttgcctaagtcctgtcctctgcacagggaagcagacttgcatccgaggcctgtccatccgctagaagcgaagtctcaggtgtgcctatagacgttgagagctctcgattgctcaatagaagccttcaggattaccttcatgccacatgcagaaggctaagggctgatcagcccagagcaggagtcccttggttccaaaaagcttcctcctcacccctccctactgcttccctccacagaacctcctccacagagccatataggaaatactttttaggctttgtgggccaataggcaaacccagtccaactgcatcctatgtcttgaagtacaaccagccatcctatccccaagagcagctttgacagtgactgtgcttcagggaatttatggacactgaaatctgagtcataatttgtacgtagcacagcacagccttttgaaagaaggggactttaaactgattccctatgagtttttatattttaaaaatctaataaatataaaaatattttaaaaatataaaaactgttcttcgctcgagaactgtgaaaggcaagccttggccggctctgcttggtggctgtagtttaccaaccctggtctagagctgtggttctcaactgggaaatccccattcaggaggtttttttgctacactttcgagtgagaattgctgtcacaagggagaatttacaggttcccaggcaagcagatgccgtagcaatagggccctgccctagtaccatactctagtctggccccatgcctgttttgtagatgacagaactaaggtccatgtgacagaactgtcctgtgaacccaggcagtgtctcgctcttcccagaatgcagagctagaggagtttttatctgtttcgagccactctgggagatctgccctgccagctcacactgcccggagctctatctgagacacaggaagtgtatttgtcccctggagtcccagcatggcagggctttggtgagtcattttccacaagtgaagctgggtacactgaagtatcttcatgagaaactcccagccagcccagagccttcttctccttctctctctctctctctctctctctctctctctctctctctctctctgtgtgtgtgtgtgtgtgtgtgtgtgtgtgtgtgtctgctctctgggaagagggcattagaatgaaggacagagcatcagatgcttagagtaacaggatttgaagatgccacactggtggtgttttagctgcagcctggggcaagtcctttttcttcagtaacgtgggagagagttttgtatctgcttctctcctacaggaaacgagaaatcaaacttgtcaagaacagcactgtatctttatcggtcatcctggcttcccccctaaccattcaactgagaaggcacatgatctttctggtgacacgggagacccatcactgtgttgatggccctatggggcagtcactcttcacgtccctgacgcgtttccactgatgacttagtgtgagaagtgttgaagccacatattcggcatgcctgtgtggccctcagattctggggacccactgagacatttggatataaacatctgtgaacctgtgtgtgtacactttttctggggaaggcaacagtttccatcaatcttcaaagggttcaatgttgccaagaaagtcaaacatggggctgagccatgtacttagttgtagagcacctgtttctcatgtgccacacctgtgtctcacatgggccacacctgcatctcacatgggccacacctgcctctcacatgggccacacctggcttctattcccacacgcccggcaccaaacacaacaacaacaacaaccactacaacaacaacaaccatagtaagttcagaggcactagcttcctcccttcctatccggtgtccttgggcacattagagatgtctcattcagatctgaatttctgtcatctcctaccttgtccaactaattcctaaaatctaagggcagattctcctggaagaaaactccaaaaccgagtagctgagaacaggtagggttagggaaagtgctgctgtgggaggagctagctaccactgcccatagcaacagattcaatacaaagttgcggttcccaaatgcagggccaggcagtaggctcagccggctgcggaggcctaaggggatgacggctcattgcctctgggagcagctctggttccatttcttgacctggcattccttttatgaaaaatatatccaaacacttggaatttgggcacattttcgcaagtgttacatttaaataaaaagttttctcagcgatgtccaactgagaaaagttaaaaagatgttacaaaatcacccccttacggactatgtaatttcgctacaaagttagcacagagctgaggaaagtcatttatacataaacgcaaataatagtgtaagattttaaaatactcctaaagccagctttaagtgtctctctccccaacccaggctgctatctaagtctgcttgcataaccttggctggctttaatcttcttatgagcccacagactgcccaggctgcctgtcagccacagtgggcctgtctaggttcccatctagctgtgatagtctgtccaccagagcaatggccccaactccaatgtacctactcctcttcctgtcttcccagggtcctctcctatctcttaccttccattacctgcagtgggagctcgttcacatcagccaattcaaggggagaaacctgcccttgaccccacactcccctccagcaacccctttactgtacaactctgtagagccaggtcttgcaaaaagaaaaaagaaaaaagaaaaaaagagcagtctccttacatgctgtctccctgagcagttctgccccaccaagccaacagcatagaacctgtcaaggctaacgtatgtgttaagcatccattatctgaaagtccactgtgttccaaattcctagactttttgtatacctatatgaatccacagatggaaaattccacactatgagactttatttcatgcactaaattagtttaaatgctatatagaattatcttcaggctgtgcgtctatatggtatatataaaacataaacgaatctcgtgtttagatttgggtcccatccccaagataactcagggatatgaaatattcaaaaattgagagaaaaaaatcagatatccaaaatacattcaatcccaagcatttagatagaataaggagtacttacttgtatttaccaatgcctcgggactgttctggcttcagcctgactgacattggctcaaaagtcagctacagatgacacattgtagattttggtcatcatccttaccattgtcattattgctgttttgagactcatttcatagcctaggctgaacttgaaccagccactctcctgctttacccgtcgtaagtctgcaggcatgtgtcactgtgtctccttatggagtaaatgtaaatgagtgtacgtgactattccagcacactttttttgttttgttttgttttttatggactcttgaagtttgagttttgtataatttttacattgtagctaaatacattttcctcggccatttaaaagtgtgaaagctgttcttagctctgtagagagcaaatgcccatctgaaaatcagtgcacagaagggcagtggtgggctgggtggggtataattccacgcgcagctacggttctcagctatgggtatttggcaaggtctggatatattctagagttgtcactactaagggtttctgatggtggctggcaagtagaagttgaaatgccatagaacattctattctgcacaggaaaccaccacagcagagttatgtaatacagatgtcagtcacctatagctgagcgccctggtctaaatgacaccatcggctaaagactgctagagccctggaggttcttctatgctaaagacttccctgtgcctctccagccagaaccactcctgagctccaggccctgccagatcctctctccagacagcttcagtggtggttcatatagcctctgcccatagaaggtttgctcaggctagaaactcaggtgggcattctcctcgacttctccctcctggtccccagatgaatcacttcccagctgcctgtccccatgtaaacgaaggaaataaagttgatcgttgtgtcttcctgaaactagtctccctcccagtgacctctgaagcaagcagtgtgagcacatacttacggatgcaagatgggatgaaggtgtacagatcgcctcctcagaatcaagggcacacagtgcagtacgggagacctgactcgaggccaatagaagtggaaggattagccaggagatgggcaaccctagcccctgaggtaccatcgcaggagctatgtaggatcaatagttcccccagactctaaccacacaaaccccagactgtagtccgagctgtacccatctctctccttaacacctcatcctgcctgtccacagatcccctcagacttctaatgccttatggacccacctcctgctccccaaatcaacacctctttgcagagccacccacttgtggctgcactaagcccaaagctgtttcagactctcatcttatccatcctgaacctgccagatcccagggctgtggacaacttctgcaactcccttcgatctgatcactttgttctctctcagtggctcagctaggctactctaccttctatctgagttactaaccagtattctaaccatgctttcctctaggcccctgccctgtttctgtcccctctgctaacactatagcccactgatcttttccacttgttccctgatctccccagaaaggtctctccctgggaagacttcctaagccttctcctccacacatatgacagatgggtgggtgacactctgcctgtcatcccaccctcaccctgtgccccatgcaggccacttagtggtgaactcccgctgatggagctgagcttgctgtacactgggtattccaaacgctttatgccttcatccctggttccagtgttccaagtaatgtgtgtcttcaattcctgcagcaatccacagaggaggagactattgctgtgcccacagtgccaattaaaaagctgagacgcagccaggcgtggtggcgcacacctttaatcccagcaattgggaggcaaaagcaggcagatttctgagttcgaggccagcctggtctctctatacagagaaaccctgtctcaaaaaaccaaaaaaaaaaaaaaaaaaaaaaaagctgagacgcagggaggtggccactaagttgtacagcctaagtaagtggcagagttaggattagtatcctataccctgcattccagacatctatctgctgagctctgggcctctttaatggatggatggatgaatggcaggtagatggataagtgggtggatggatggatggatggnnnnnnnnnnnnnnnnnnnnnnnnnnnnnnnnnnnnnnnatccctgaggggccctttggagtagctttgccctagacagtatatattctttcagacctagtctttcagtcttccaagagggtcagctaggcacaaacctagcatgagcaatgtgaagaaatctagtcttcacagataccacaggctgggagaaaccaaatagttgcctccagaccaggaatagtgagcttcttgccaaggacactaggggagctctcgggaagacttcagggagcagggggaagggggagaagaggaggacaaaagagggctagggatgaggaggaggggaggaagggtgtgaggtagtcttgaattatcgaagaagtggtggagcaaggtgtgttcagccggggagtgacgatgaggaagaagggtattggggggctggtgaggacaggaaggatagcaccataggtctgcaagccgacaagcttggccagaaggaggtctggaagaggagggaagacaaggtaggccctgatggaagtgggccagggagcagaaatgccagactcagcactttatcttctcgagacacagtcagttgaacacagaaggacagcatggagaacaagaatcttggctggaggattagtcatctgaaaagatgcccccagctgtggtagcactgccccattcttgcatgtctactctgccaagggttaggctctaaaaccaaacacacttccaggtgccaattaaagtctcttatctctgagtcttggcagagtcctcaccaaatcccttctgaggtccccaagtggccccaggccctttgctcagcccaggcctgcctgtctgccctcctgctgggtgcctgacactcttgagtacaatgctaattatgcctttagcgaaggcctattattctctgaaagttaacagagcatacttgtcccaggcccagctgtcctgacctgtttgtccttgcttacgtctaacccattaaggagccggctgggttttgtcactccaggaacagccctcagtccagcttctgcagtgtggtttctgcgaccttatcttctccgtcatagaaaggccacgcccctgactaggatccagaggatccaggtagctatggactcctgtgaattcttttttttttttttttttcgagacaggctctctctatgtagccctggctgtcctggagattgaaatgtagaccaggctgcactcacagagatccacctgcgccacctgagtgctggaattaaaagcatgccccaccatgcccagctttatgggctatttgttttgttttgttggtttttttaagacagggtttcctctgtgtagccctggctgtcttggaacttactcagttgtccaggctggccttgaactcagaaattcacctgcctctgtctcctgagtgctagaactaaaagggtgcatcaccactgcctggcattttacgtccattcttttttgtttgttttttgttttggtttgttgtttttttttttttttaagacacacacacacacacacacacacacactgtagctgtcatcaaacataccagaagagggcatcagatcccattacagatggtgtgagccaccatgtggtgctgagaattgaactcaggacctctggaagagcagtcagtgctcttaaccgctgagccatctctccagccccttatattcattcttaaatgcatccagagaatattgatacatgggagagactagtttaaacagcatgtattagttttgcttacacacacacacacacacacacacacacacacacatacacacgctcaatggcagaagaatggctcagcatgtgacaacttctgtctctcaggatccttgccggtcacttttgcactgtcctctcagagtctaagatggattatggcccctgccattggaagaacagacttgcaagggttgacataagctgactacaacgaatctctaagaggcttcctcctggtgggtacaagggaaggtggctggatcggcccaccagattatctccaggccctatctctaagtgaggtcctcgagatgtccgggagccacttcctctgtaacaaacgggcgaggctcctcaggtgtaagataccagaagtcttcaggtcatcactctattgacagccacctcccccgtcatctctagtgattaaatctatttgtctggtgttgtggaagggctactcctgaggagtagcctctgagctatgcatggtgacgaagggggggaggagggagatacagggaaggaggagggggctcacagaaggtgtgccttggctagcgctcttgcaactctagacagcagcatagctacccccaggaagctcgctccataagaggaaaggacagtttcgcaagtgaggctggacctggggagctgcccgttggtccctggcacggcactgggcctgttaggaaatcagggagacattgtgtctcccgggcaggcgccacttctcacttgccccggtcgtgctcacttcaggcgctggctccagagccaggctggcagctgggccggtggctgggtgccctcttgccacaggcctgatgcccaggaagccacagctacagcttggaaagtatccctcttttgggtcccatggtaaggccagggggctgtgaggagccatatgagcaggaggtcagctgcgtactagttacgaagaattccagactctttcctccagaggttgagcgccaacgccctcttgtcctttcctgtcaagtagggattcctctacacacacacacacacacacacacacacacacacaagaaagccccacccaagatgcccagctcccaccctgacttgaaggggacggtctgcctctggttctgtaagtagcttagagctgtgaaggtgcacagagctaatgttttaatattgtatatttgaaccggcaaaggggtctggggtaggaaagagggtgtttgctatcttgggggctgctcaatcaaacaagatgtttcttagcggagacaacagccatgggaatgggtccaagggcaataatgaagtgtgtctagtccagatgggtgcacaagagatgacagcaggtaagccatgaggctgtgaataaggataggcacagtacagcccctgcttccttgggggtgaactaggcatgcctttctgaggaactgtcccattttgaaggctgtgggaatacagccagcatagaacggtgtgaagtcccttgaaggtttacggtcaccggagtgaactgtgggagctcacactgtccacaccaagagcacacctagcctcgcagcattcccactgcaccatggcccatttccaatcagtagtctacccaaatcatgcagactcgcccgccgcctaagatgttcctgagaggcagaggactggcctgcttgactcctcaaggtcttcttccgaccaagcagtccctctttcgacagtcgagttgctatgggaactataaccttgaatttcctggctctgaggctgtgaaaatcacaacctgaaccttccgttgaagtgggtttttcgattaatttcctgtttgattgtttactttagagagcggaaaatgcctttgcagcagctaggtccctttacccagaggctgtcacaccctccctgcaaggtcaagtccaggccttgggtgggtggagggactggggggggggggcggcaggggagagcaaagggccagggcagggaggaggcccagctaggggcaaaaggcagtctgaccccctatgctgccctgtttttctccttgttcttcccagggccccagcatggtgagacagacctaggagttcccactctggccctagctggggagcctggccacccacccagagccccaggcctggcccccagccagccttaaccctccctgactcagagaactattcggttctgagtcagacacaggccacagttactccattccttcagagggtaatgtgaggggtgatcgcctggaagggcccctgtgcatggctccccaagctaagctgccccataggcagctgggagaatgtctgccttggtgtcttttatttgctgcggccgagagcagtatgtgatatgtcagctgctgtaactccatcccaatttccctctccctctctctctctctttctctctctctctctctctctctctctctctctctctctctctctctctctcgtgtggggagggggcaaggcgaagggttggcaggcaggctcaggtaaggcccaagttccctcccctttgatgagaagcaccctgtgataggcattggcaacccaggccttcctccctgtctgcatattcaccctcagagagaggcaggagcctgcgcctgccttattagtggacatgctgaccccagggcagaggtgggattgccttgtgttctcggacctgtgaagtaaactctccaaagcagggcagtttgaagaagtactgttccgaatagcttccaaatgacgggtaaaacctgagagtatcccacgcaaaccaggtaagcagccactcacccttcccaggcctgactctgtgcagctcactgggcagcagtagctaaaccacattgactttgaagccagatgagatctaggttcacatcccacttacccactgttgcgttctctgggggaagttattttgtttctcgcctgtttcccctagcatgagaaatcattagagtgtctaacagggggagaagggtttaaaaatggacacaaagctcacctaaaacaagcaccgaaaatgtaattcaggtaaccgatcagacgcccaaaggtgctgtccagcattcaggagcctcctcttggggcggggtgtgggtggggagctacctccagtctctcctctccttaaagcaagatgggtagatgcttaggtaactcaaacctgaaaagacaagcagctcctagaaaggactagaataggctctacaggcaaagctaggaggctctgactgcagacatggttgacctttggtcctgggaatccatagttgcagggattgtgagcagaactcctttttattcgggccactgaccagagcttggctccccagaggagccactcaccaccggggctgtggcccctggctctggtgtctacagaaggattcggtgtctgctgagggcctcagatgatatttccagtccctggggccagctgtgggtgaagcactacccccatgtgacatttagtgaggtcactttgtagtggaggtttgcaagctctgcaagaaggaaactaatcagccctcaccaccgggcgggcgcctggtccgtggctagggtaagctgctcacctccattacagggctagcagccagcccttgggcacagactcagaccgaatgctagggctgaaacatgcacttccttgacatctgaccctggccaagctaccaagactcccgttaggctattagacaagtaacattagggaaaattcccctcttgggggtatccaagatgcaggcagcacagatattttcttagacaatgctaagaaattaacatgtgaacacgccgaaccccatagctttacccgcagtgtggacagcatgagcgtttacataagcaccttcacagcccctgcatccagagtgagagagcccttctcttaccctaggctgatctgtgtgcctaatccccctctctcctaactctgcccaatctggttcaatctgaaacttttaaactggttacatatccccctgcctccacacacattcctgtcaaaccaatgccaccctttttctcttgatgtcttctctcccataggcgaggtctgaagaaaaacgagagcgggggaagggcagttggaaagagagagagaaggaggaagaaacagatattggagaggcccccaagtaaaagcaagcaggagtatattctttctctgtgtaccttgggcttccttcacattctccaggccctggtgtctagcttctgcctgactctatcacgcactgatgtcatcatggcaaaggtcaccctctttcctaatcactaaatccactgtggtcattgttcatcgtacttgatctctccaagcatttgacctgctggccttctacttcctggaaaccttaccttccatgacgcttcttcctctagctccacttagatctctgactatcctccccttcctcccctgggactcatcctctcttatcccaggtcagaccttctcttctcattctgtgtattctccaggtcacctgattcacaccgatggccttgactgccccgggtactgagccaggtagccacttccccacggaactcgctcactcccgccttcccatactgttggtggctttgccacatatgcctctgattaagcttcaagcaggcttcctcgttctagtttattctccactctttgaaagaaaggatctttcttaaatgtaaatatcatctgctagtctcccatttaaaatctttcaggggatctgggcagtgatggcgcacgcctttaatcccagcacttgagaggcagaggcaggcagatttctgagtttgaggccagcctggtctacagagtgagttccaggacagtcagggctacatagagaaatgctgtcaaaaaaaaaaaatctttcagggctcttcagaatcttgagattaaacacaaaacaaaacaaaacaaaaaaaacaaaaacaaaaataaaacccagcgttgagcagcacagcatctaaatccagttggtatttgtccctagccttgtttgctatgctatgttcccctgcccctagtctgtgtacttcaggtatcttggcacactgttggcatactggccagtgcagtggtgaactcggcttgctctcattgccttagccttcagacattcttttttgcaaaaggcctggaatattctccactaccaccactattctccctctactctaaccccatatgccataagtctctctagtcttccctactatgttgtaagtcttatcattattttgtgtctacattgtgcttaccatatagggcattccttaaatattggggtatcagtggatgcatacttgtatggatggatggatggatgaattgatgaatgggtgggcggatgagtcaatgtgtagatagaagggtgagcgaatgggtaagtggatgaatgaataagcagatggatgagagtgcacagatgaatacagttgtcaccagcgaaatcaaagaacaggcaaaatcaatgccatgttgtaaaagcccaggctggcttttacagctaccagtcagcagaattaagaattacgagttccagctatcagactaaaaattagctagtccaggagaaatgaacagtgctctgtaagtcagaggatgctgacccgggactctgagctttgtctaactctgctcagactctctgtctgccttctgcaagccacttaactactgtggctcagtctctctgtctattaagtagagataacaatgcctgtggcctttgcctgtctccacaagagtgtcacgagggtacaaagtgtgttggtatctgcagggaagatatatgtttataaagatataagtataatcataataataacaccttgcgtgcgctcggctcgggctttgtgcttttcaaaagttctcgcctatatattatctcagttgactctcaaaacagggaggcagatattatccccattctcggataaggaaactgaggtgcagcgtcattaagtggcatgccctgggtgtctcttggtcagtggcagatcctgactgtcagcctgctgcacatttttgatgatagccttttcttggatagattatctgcctccctgaacagagagaagcaggcataattgacccctcttctggatgactcaaggtcattaccatgagtatcagttcctgtgttgtcttttagacttggctgtgatgcaggcccagagccagcagaggcataggatagacaggctctgacgactgtggcgtccccagtccaacaacctgtgatcctaggaccacgtgctagagctgtgccctatctctcgctctctcttctttctttccactgtcagtgtctgcgcccatctctgagatgtccaccccctccagttctttgatctcctttttgatctttctggccttcagcttcttccacgctttgacatttatctttctaggtcttggtccttccatatatacatccagccaatcagaacattctgatgggctctggtctccaacaaggtatcaagagtcacactctatagacttctttatcctctacctgccttgcttcctccagcctccccataacctgtgctactgacaacagagtcagagagagctctggctattgtatgtgaggcagctgggtctgttctccaagactgcaaagtgtgcctgtggagagccgcggtagtcaggaagggctggccagcatggtctcaggttgacaccctccccagtgagacacaaagctgtggtggtctccttgatcatcccaatcagcacatcaaggcaggcccacgtgtccttccctccgcaccttctttctctccctgctgggtggcatcccaaaagccagcctggttccatactgggcacgccttgggcagcttgcccatactccatggcccttcccaggggggggactcggggatgctctttctctagttgctgtcaggcctcccacagcctggctggagcacctcagcttcttctccctgagggaggatgtgaagggtgtgcccacaacaaggctccggcagagacaatagcccaggaatgcgttcgcttcctaacaaacactgtgtgggctcgcacaattgccttggattctcgtccaagaaacacatttcacagtgcaagggtgcgggtggcttgcctgccccagcccgcccacatctctctctatgccaaagacttggatgaggggtggcctgttccccacccagaccttcaccagagaacgtaggccatgcttggtgcagcccttcttaagagaagagactcagaaggacaatctagtcttccagagggttttgctctgattactctttttatttatttatttatttatttatagccagttatttttgttgtggtaaaatatacgtactataatacttagcattttaaatatacttttaggccattcacgttgctttatgatcaaccctaccgctacggagactttctatatttccccaattgaaaaacctgtctccactgactaagtcccaccccaccctgcagttcccatcagctaccatctgctttctgtctctatgaatgtgtctgtcctcagaacctcatgtaagtagactcaggctgcgtttgttcttttgtgcctggctcctctcagcagtgcgtgaagggtcactgaagtaaagacacatcatgactcctgaatattagtcagccccagtagatgggtcattcatttatcctttgcctccaatgagggacacctgggttgctctgcctttgattactgccaatcatatggccctgaagaagtatgcgagtgttatgtctgttcaagtggccactcccttttggagaccaatctttgagttcaaacaactgtctctcctgaaaaatcccaagtagaacacgcatgaatgagaaaatggcttggcccctcgatatacaaacagggttctcctaacccagctgtccttttgggaacctagactcagagaaatgggacacagagcaggcaatctgggtcaagatgggagaatggaaaggttctgtacttggaaggatgtctgggaaatccacaaagggaaagtccagtagcagatcctagggagccacagatgggtctgggtaacctgggaggatacacacaaaggggttccagggagggatccctcaatgaaggaggcagatgagcctcgtgctagctcatgaagcagaggtggagacttcccgactgtccacagagcggacaaggtacacagcagtcagaggaggaggtcaaaggaactattctacagtcaatgctaaagggttctaggggtccatgttcgacagagagggctgagtctgcatgtgtagggtgagcaggtcagagtccaatgccaggtgtcttcttccctgttgtttgaagcaagttcttcaagtgaaccctgggctcagtaattaggctagaccagtaggcccttgaaccccagtgatccccctgcctctgcctccccaaggctgagattacaagtgtggcccctgacacttgagatttttacacagttcctagagatccaacttgggtccccctgcttgccagacaagcactttaccaactgagccatctccccagcctttccttcctgtcctctccctacgcagcaccattgaagacaagagaatgaaaggcacagccctcaggagcttccttgagaaagcctagcaggcctgcacaacagggcctatcgcacgatgtgatttttggcttagcccagactttcccaacagccaagtaagagataaggttggaagagggaaccttcccccagctctacttgggagtcctgagccatcttccctgtcccaagtgagggattcaggccctgcagggcaggcgcagtggtactcgcctatggggagcctgggatagtacaagggcatggggaaagagcagaggaataaaggaaggaacatggacagacaacggagcctcatcctgtcagagaaggccaaaggaagataagcaggcattggatgggttaagtagggaggagttgttggcttggggtgtcagggcactctgccataggcctcagagctgcttgacactttccctgcgtcattaccagaagtggtaaagcacatgccacagcagccattgcgtctcaggtcctgggtctttgaggatttccccataatattgcttcatttgtcagaaaccaggtagactcttgtggggagatactacaggcccaaaggctgatctctggaccaacatgaccagcacaggtcagcatgtgctatgggaaagctgccataactctcccaccccttgccccagacacctcatcttctgcctgccttataatttctgtagcattttatttatttattggaatgtctacagtatgccttgtgggttttgtttcttttgaggtagactctcactatggagcccaaactggcctaaaatacaacatccccctgccacaggaagtcctgatattacaggtgtgcgccaccattcccagccagccatttttgatttaagaattctctcctgcaaactgtcccccacccccaagaagggctgcgggggaaggggttagggggacctgagggaaagtcacagcaggagtcccagagctatgcagagctcaccttattcgagcctagcctccatctgccctgtggagtaagtggaagcaggcatatctttccctccagcttcccccagcagggtcacccttcccggctttgggattcgctcccagagtgggctagatggaatgctggcctgcttcagggtgagatgccactcaacacttcccagaatgtgtttcctaatcttcaacatggtttcccaagtcacccagatgagagacctgtgtgtggctcttagagcaccccagggacacccccaggacacctccaagggaagtatcctgagctcttctcaggtattgacaatcctgggataagagtcaagaggaagccagaagcagacaccactggagggaagacacagctgtgtgctacagtctgctgtgcagacatagcaggaggtgtgcacgctactatctttctttcactctaatagaatgaagttgataatgggtatgttgtttaaagtgtgcaggtacatgctcagaagaaagttcttgccaagcagtggtggcgcacgcctttaatcccagcccttgggaggcagaggcaggcagatttctgagttggaggccagcctggtctacagagtgagtttcaggacagccagggctatacagagaaatcctgtctcgaataaaccaaaaaaagaaaaagaaaaagaaaaagaaagtcctgcaagtaacactgactgggtcagaggctttgaagctggtaatttcacaatgtgttcctagagcaataggtctcaaccttcctaatgctgaggccctttaacacagttcctcatgctgtggtgaccccaaccataaaattattttcattgctacttcgtaactgtcatttttgcgacttttgtgaattgtgatgtaaggatctgatattcgagatatctgatatctgataggtgagatagctgattcgatctctgtgagagggtcgtttaccaagggggttaagaacctctgccctagacggcaccggcgcaagctatgtgtttgcagaaacatccgttgcaattctgtgccatgtcctttctggcgagagaggtatgtgagatggtgccgctcacaccctcctctgttaccttccaaggcgagatatatatatatatctgaaggcagtggcccctcagcttggcccttcacttacctcctgtagacactgccagcttgacaggctatcttcctgcctcccaaattctctttctagcagattttattattattattattattaagccaggggctgaggacaaaggtagacaaatcaggccttggtcttataaaacttcacttgtgatggagggagaggacaacacacacaagaagagagagatgtcagggaccctagagagatgtcagtggaccatgagtgggcgcatcagtgacactttcctagggagagacctatctgaagagtcgtgggggggggggcctccatagggcgagatggtgaaatctgtggttatggggtggcctagaatctccagggacagaaatacaaagatcagaactagaactgtgatatgtgtgagacgtgcagttatataccgaaaatgctgactgcgagccaaatgtagcattataatctcagcactgggaaggctgggtaagaggatggctagttcgagaccaggctgcaccttgtatgaaactatgtctcaaatggggggaaaaaaacaagcaaaacattggtggtacacacttctaatcctaaaacttagacagtagagacaggggcaccaagaattcaaggtcatctttagttacatagcgaattcaaggccagcttgggctacatgaggcctctgtctcagacaaagaaaaaaaaagtgaatctcacattaaatgaattatgtctcaatttctaaagagagagattgggaagacagggtggataggtggaggaaaccttggtgggatgtgggcaaggcagcctggtcatgccttagttaataggcacttattagaacagaggagtcatagctggctttgggtttacagtgttgcacctgtggagaaccatgtgtgacggctcagctctttcccacaggcagatcttgacccctgacccagtgaagatgttggtcaccaatagcatcaaagctgggccaggaatgagcagaacagcggtccttctgaagggtctagcagccgtgagtgtacagcctgaccgttttcttctctgccctctcttccacagctcttgcagtcacaggatgtgaaggaagacgcagtcctctgctgttctatggaggtgagcggtgggctcagatggcctgatgtccagactcagtgccctcaggccttacagttgagggaaaccaaagccgttagggcagccactggtcctgggagctgtcagtggagcatgggtaggagcatccatgacacattgctagggagagacctatctaaagcgttgtgtgtgctcggggcctccatagggtgagatggtgagccaggcatgtagaggattgttctctaggggaatcattataggctggcactgtccacttctcagtttgaaggcctcctgctgtttagatcaggtgtgccatacggatgacttaagaggttaagaggttacaagtgacctgctgccctaaagatctcccttcatttccatggtatgcaactgggagaaggcgccaaatgactgagtgagtctcctacattggctcttgggaggcactactcctaatctcaaggtgtagccactgaacactgaggcttcttctggaatcttccttccaaggctggctgggttcttgggacagatccttgccctctacaaatagaccagaatcactcaggatagcacacagagagaagcccttctggcatggggacccagcctatctatgcaagtgagcttactgtacgctcaggtggcaaaggccacatcccaggagctctaagtcccaagaagctgcgcagcagtcttggttggatgagacgtcatgaggttcgtttgttgggcttcagctgggccgctgcatggcacttgcagagcttagagggaaagacaagtcagggtctggtccttcagatagcttcaaggctggcacaagctcaggggctgaggaatgtataagggaaatgtgcatatatccctggaaatcaggagagaggggtcagagtggctcacagatgtctgagaggggcattatgggaaaggtggagtctagaaaagcaggtaggacaagccagggtacagtggcaagaaatgtttagttatataggatcctgcaggagttgttagccagaagtccagaaagattagagtttctcctggccagcattcttttcttttcttttcttttcttttcttttcttttcttttcttttcttttcttttcttttctcttctcttctcttctcttctcttctcttctcttctctttctttccttttctttttcctctaaagattgaagggtctcctatttacctggctggcctacttcagtttgtatctctctgttagttatcatcacagatgtgggcagaggtcagttctggggcaagaggtatgtttgggcttagaaaggagacccatttcccctcatgtttcacacaggcacacataggtactaatcactggtctgtttccagagaaatacctggcagatgggaattaccacaaagatgcttcattgcccacgagagcagaccatggggtcaagccagagtctaagtgtagtcagagaaggcttccagcaggaggggaggtcctggggtagaaaacacaagagatgagttcctggtgagttgctgtcaggcctgggcagcaggcaatatcctggtaccggacatacctgctggcagatggttgttaaatctcacggttggctattcctgcgtggatctgcatatccctaggacaatttatatcttttttggtccttgcttccagcctacctagccaaggattgggagggaaatgaagggcgggaaggaggagtgcatattatggggtccgagtccccaccctgaccacacttttcatccacagctacaaagcacaggccggctgctagaggagcagctgccagagatgatgacggagctcctagccagcgcaagagataagatgctgtgcccctcagagtccatgctaacccggtccctgctcctggaggtcatcgagctccacgccaacagctggaaccctctgacgccccccatcacgcagtactacaacaggaccatccagaaactgacagcctgacagcccagccgagggggcctggcaggcagcccgtgggcagctggggccctagtgcacagggccagatggacaggcgcaaggacaggggtggccctggcgggaaagagaactgagcagggaggcaggtagccacggtggccggtctggagccagcggagaaggaggagattggatccctcagaagggctccccgtgcagccccacccccacccacccccaagcctgcgcatgtggcagctcacaccaagggaaagcatgtctctttgtcctggtggtcacccgtccttgctctcttctcctcggctccagtcctcnnnnnnnnnnnnnnnnnnnnnnnnnnnnnnnnnnnnnnnnnnnnnnnnnnnnnnnnnnnnnnnnnnnnnnnnnnnnnnnnnnnnnnnnnnnnnnnnnnnnnnnnnnnnnnnnnnnnnnnnnnnnnnnnnnnnnnnnnnnnnnnnnnnnnnnnnnnnnnnnnnnnnnnnnntctcctcactgtctacagctgcctctctgcctcccacacctctggccaccgcttgggtcagccaggactgctgaaggctgaaaaagtgggtcgagacagctctcattgttcccacgtgctgtcagccacggtcgccaactggcagcaggcagcgggcagcagatgtctgggaggacaaaggcaggcacggtccccaccagccgcccataattgatggcctttgtcagccccagcggagctggagagaggcttttttttctcctctaacctccgtgctccaccctccaaccctcggcctccagccccagggcccactgctccccctggcagagaagggagagccagggctcacagctcagcgtgaacccttttattttgtttttcaaaactcagtggctttgaagtctcttttcctcaatgaaaatgccctagattttgagatcacatcgttctcccctcaaggatcccctgattagtgggagactaagacctgccccccctccccaaagaatctagccactagcagcttgccagtagccagctagtaattggaaacttctgctccaatgggggtccccactggaatcctgtgttcctgggcccctgtcctgcagtgcctctgttctgtccactgctagcttccaaagggctggactgactgccttaggacctgccctggctcctgttactggcaaacggggccagaaacgaggctggcaaattacaaccaaatgcaggtcttgttccgagcaactgttgagggaagagcccactgctgactccacagatcttggagcctccttcatgatcccatgccgcatcccaggcaagacccacaagccctacctccaaggctgctggggagagggggaatcattgggtcctgactgggacggtttggtaggcagccagatagacaatgaagttcttcaggctagaaacaaagtcctggtttcttgggaggctctggtcccagggagcaaccacttctataaaggctagggaggaggaggaggccatcagagaggctggtcttactgggatgactggtggctcctccccctcatctctggggagctggaacccacactttgatgacaccccccccagaacatgtgtccaagcccatgcactggacctgggcatacctagaccatggtggaggctctaaaccagtggttctcaacctgtgggtcacgacccctgtaggggactcgaatgaccctttcacaagggtcacacatcagatatcctgtgtatccgatatttacctgacgattcataacggtagcaaaaattgacaattacggagtagcaacaaaaataattttgtggttggggttcaccactgcatgaggaagattaaagggttgcagcatcagggaggttgagaaccactgctctgtaggcctcctggttgaattcaggctgtctcgagtaaggatggtttctcctaactgtcccaagtctagaagagtagaaagcgatcagggtggaggagggagagttcccgagttctctgtggctgtctccaactcaagtgttcaggtcccaagatggggcctctgaagagggctgctgagaaaaaggaataggggtcacggccaccccagctttgatctctttccttttcttctcctccttcctagccttcttttctctgctgcttgctgccttgtctcccatcccagcccttaggctgagcctggagcccagggacacgataagccccacaggaggtgtggagggaagagcagggcaggtggagtagccagagaagacaccagggagatcctgctcctgtggacttgggcagcccaggctcacaggcacctgctccctgcatcctctggggccatggtgtgcttacatgggctgcttcccaggtgtgagcgtgtgagtgagtgagtgtgtgtgtgtgtgtgtgtgtgtgtgtgtgtgtgtgtgtgtgtgtgcatttgcatctgctaagaatgaagcaggaccttgaggaaggaagagactgatggtagggactcaagccacagtagagaggtctcctagactcctcattgggctcacagagtaggctccacacagtggcttccaaacactgtgtagaagagctagtgtcccctaaagaggcagagaccatggctttgtgggcaccatgggcctaattcagctccttcttgatgtcctgttggagggtcttgcttcaagagcatgccctcgtagggccttgaggaccagtgtgaagatgcaagatataaatatgtatacatatataaatatatttttaattacatgttgtgtcccagtggctccagacttgcagtttgcctagcgtattccattgtttgaaactacttcctggtccatcctgatatgacactttccagctgtctgtctgtctgtcttaaacgcagatctctgctactttttcaaacatggaaagaaaccctttttattattatcattattattattttattttttaaagagacaacagtaaagcctaaaatctaaaaggctgagcaccttcctgtgggggataactcaagcaggaagtaggggacttgcaggcacccacagaccctgactccccgggacagagcctctcctgctgcgggaggaacggcctatcaaagcctgcctctgatgaatgaacaggaggcaaagcctctctcaaacttgtgttgtcctgtctggccatgatgctctgatattgagcctttttaggctccgcccacctgtcaggacaagttggtccttgttttccactcaagtggcctgctggtcactgccctcctcatgaactggccgtattgcctaagctctgggaccacagctcctgtcgggctcttgaactcccctggacaaccaaccccttccaccaaccacggggaacctcttcccccacccccaaaaaaaccatcttcacctgggcatcgttcctcatccagtctgtaaacctttacagtttgcggatcatcttgtccatttgtgtacatgtaaatgttgacccaattggtatttattctaatttttattgtattttattttattctgtctgagggtgggggatgggaagtacaccactggtggcaaccagggcagagctgcagggatgcagcccaggaagcaagagaagcacctccctggggccactctagatggcagcctgtcagtacccacaccctgggctgttatctggaattggaagccggacagtgttcgtcatcccatacacacaggcctgcccgtggcatgatgtccctcagctgcctggcaccatgttgggaaacctctgactggctcttcgaggaggtgggttggagagactagaattctcctctgctcagggcactggccccagaagatctatctggagcctcactgagccagctgggagcctgacaacaggacctacctccctggagcagggtctggagattgccgccaaagctatgggccaaccctgctcgcgccgaccccttccatctacccgtatatcctgcttcccagctgaacccaaactacaagtgggtttaaaaaaaataaataaacgataccaaaaaaaaaaaaaaaaaaaccaaaagtatgctgagtctttcttctctgtgttgagctcagcagtggaatgctttccccaagcctcagctggtacaggcaggagtctccgaagagcccagcccaggctatgtgctgggtgaccagagaatcttcatctctcccctggctgctgtccagggcaagagcagactctagggcaggaggaggttgggaaagggctcatgcaagataagtgggcaaaggaatgagcctgctgtctctaaaagctgggctctgaggccaagtcagggtggtggaatttcctaaagaaaatggcttttgtgatagctttggcttgttacagatttacccagtccccagacctacccatagcatttggcaatgactgctaagaagcccaagactctggctggcaaagtctcggccacaagtattggccagtattggttcagtctcaggcagtcaaagtccgaaatcgagtccgaaatgagccccacgaggtgtacatgatagtgcaccctcgtttcagtttcttctgtggagaagcgggaacactacctcttagtaacaacaccttgtccttaggtgggcacagccttagcctgagagggcatgtggagattcagccattgcttggaactgagtctgattacctccacaaactgcctctggataaccaaaccgacacacaacttggatagaagaaagtgatgacatcattaaatggctgaaatctttgtcacgccaatatacaaaaattcaaaggagtaggtgcagcagcgagggggcaaaaggaaagtgtttgaagataactctcagggagaaacaagagtttatacctgaatccccacccaaagagacgattccgggtgagttagtccctcttcgaagggtatagattactgagtccccgtgcagcctgtcatccaaatatgagtgtttcatcccgcacttcaccctcatctctgctatatgagtcctccgtcttgtaaagagcaggctacatttgtcctagctctatagaaaggcaaaagaggaatgcttcatttgaaatgatcatctagagcatgccacagaccaaaaaaagccttttgagtaccaaaacaaaggttgggaacagaatgggagccaagagaagggatggctgggcgaggagacagtggttctgccccaggttcatgctctcagttggctcagtaagtaggcagacaaatggtatttgaggtgggctaagagtaagagttttaactttatggtgtgtgtgtatgagtttttgcctgcggagtatacgtgccacatgtgttcctggtacctgtgggagtcagaagaaggcatcagctcttctggaactggagttctggatggttgtgagccacatgtgtgtgctgggaactgaaccttggtcctttacaagagcaacaagtactcttaactgccaagccatctctccagcctcttgtttctgttttgttttgttttgttttttggtttttttttttttttgtcatctgtgcacacagatgtgtatctataggtgtgtgtaggtgtgtgggtgtgtgtaagtgttgcatacgtctgtgtatctacgtgtgtgtttgtgtgtgcttgctacattgcagtggggggagcttcgtgggggagcaggtaagtcactcttatccccctatgctgcagctcaagtctttttaaaagtctttatttattaaagataaaatcatctgggcagtggtggtgcacacctttagtcccagcacttgggaggcagaggcaggtggatttctgagttcgaggccagcctggtctacagagtgagttccaggacagccagggctacacagagaaaccctgtctccaaacaaacaaacaaacaaacaaacaagataagctaaaggatagttctgtggagtcttccctttacaaaggttctgggactccagctcaggttgccagggttacagcagcagcatcttttccccctgagctgtcttgccagccctgctctgactttgttatggtactgaatatggaacccaaggcctcatgaagccttagcactgagctggactccatgcgggctaagtggttctgactcccattttacagacaagccaagggccaacaacgcaagggccagatccagccaagtgccttttaccctagccctgaaagctggcggccatcattctgccccaccccgtgtcccctgcattggccagtctatcagacaaaggggcagccagctgcctgctaagaggggaacagagcagctctccaacttcgctcctgctgtggagaccagggcatctaggctttctgcatgggtgtgggaggaacctaccaaagtttgagttctttgtacagtgtgtcccgctgggtcccagtttgcaaagacagaagataagaaagtccctgtggggtgacacttcaagggccaggccaataaacaaattgctagaaactttctctaactgctgatacaggacacacccacacagtgtaacttccagaaccttgaccttagagaacctcttttctcacttaagggtagtgggtatgtcaagccttgattggggtgccagagggaaggggttgagagccactatctgcgccccttggagcacagcataatgttcaccatgaagaccagtgatgatcttgtagcattgacacccgtagtgggtcttgtagccatactccaagctgcggtgctgggtttgccactgtggctgacatgtggtggccagcacattcagagtgggggagggtccagtaagccacttgagttcaatagaatacataccctgattcaagattgtttatgacactcatgggccctaagcacttttactttcctaagcctgccactctcgtgcgtgtgtgtgtgtgtgtgtgtgtgtgtgtgtgtgtgtacactcgatttcatagttttcatagctatattagtatagagacatcaataattattaaacattttctttaacctaaacattaattaaaagaaatcctgttgtagaccccaagatactgtaacaaagcatcccagaactagatggcttatgaacaacaagcagattatttctggctgttctgaaagctggcagtctggggcagaggtgtcagcatggcaggctctaggagtgaggacccttctggctgcagactgccaacttctcgttgcatctatgcaggcagaaaaggggttcgcaaagagctggggtgggaggcagcttttgtaagggcactaactccattcctaaggggttcactctgtgacactcccccccccccacaaaggtacacctctgaatgttacccgactagggcttagaattccaacatgaatttagagctagtcatttgttcatagtagcatgctgctcagcctaggcaacctcagccctgtgtaggtatcttccccgagcaaggagtcctgcctttcctggctgcctatttgggttcagggtgactgagggcaaggagggggttaacagggcagctcacagaagcaacccagggtccccacacatgggtctccatctccattagtctctcatttactaagccctcctgtatcctgggcatggtcctgtgcgctcagtcttctgtaattctcaggagcatccagactatgggtatcattggctctggggatggatgactgcagccagaatcccacagctgccccgatgtagagagttctatgtgtggtgatctcagacaccaaactcctgcttctgaggccccttacctcccccacaccccagtgctttcctattttttcctatttctctctccttccccccctccccttgcattggagggctttagggaaatacattcagaaaatgagagctggcagcagagcgtcccttaccacagccatccacccacaagcctagctcaattgctgggtgaccagagcaaggttctgacagtggcatgcccatgatagagagccaatgcctggcttagggcctccggtaatactatagtgcttgcccaatttcattcccagactcagaagaaaggacagcccctccctatcaggtgacaagctagggggaacccccagaacccaggtctgcatgagaaaaatcagcatgctgcatgctgagaactgagaacaagcttctagaacaaccccatgtgtcgccaaaacatcacagagctggattttacagatgctcactcaaatgcacaaaaccttgtacagacttgcttctagatgagccaacggtggtaggctcccacagcagacactcacacctgcacaatgtcaacacaggccacacgggtgtcagtcccactaatcaccgactcaatttggagccacttcggtgaaatgtctaactcagtcttcctgcctcagcctcctaagtgctggggttccacgtgtgcaccgccgccgtgtctggttacaacatttcttcgttaaatgtaggactgtgcactcacagggactatcctgctgaactgggttgaaaggaggtccccagcctgcaattcctgtgctccagcagagtctctaagaactagcgggaggtatcatactcggagttctagaagcttcattcagccctcactattccgttatgatacaagacagccacccgctccaacccctcagttcccagggcacaacagaggctctggtcaggattctcggtgacccaacagaccgctcactcggggccatcaaggtaagtccaaggtgaactaaatgggtgactcaagggctcagggcccaatcagggccaggcacaccctccagagccgtctcagcctagaggaacatagacgtcagtgtcattctgaagaggctgacagaggacaggaaggtgacactataagtacaaaaaaaaaaataaaagtcacttgggtttttcctgggtaacttccgccatgacactcaaggtggtgaatgagcaagctgaaagtcccagggtctgtgtctgtttcactgtcagtgcctcgagggctgcggacggggcagagtttgggtaacactggctggcttgggctcacatttctccatgatgacaaagggacagagctcagcatatttgagtcacagtgactagtggagcagactttcgcttagtgccacctcctgtgccccgagtgccctccaagtcagggttacaagtcccctctggaccaaacagacagtactggcccagaagcaaacccggttcagggatacgaaccttcccacagcctactggagcaattaaaagggaaagaggtggtgagaaacatcaggggattagttaactctccaggtagggagcattttggttggggaagaggatccaggcccaagagtctgtaggttctgatcttcacaccaattagatctctccctcccaggcacctggcattgtgcactgggatctgatcatgcgactaacaaaccttaaactatgaagttttgtttgattggttggttgggtttttttgtttctgggtttgtgtgtgtgtgtgtgttgtttgttttgttttgtttttgttttgagacaggttttctctttgtagtccttcctgtcctggaattcagagtggccttgaactcagagattccccttgcctctgcctcccaagtactgggattaaagaaaggcatgtgccgccaccacccagccttagtttttggtttggtttgactggttgtttggttggttgattggttggttggtttggtttggggtttttggttgtttggttgtttggttgggttttttgattggttggttggttggtttggtttggcttggtttttgattggaatagctccatagaagtgttttgcaccctgatatctgacaccgcatatttcaccctttcttggggtgaaatggcccagggtcatttccaaaacatgaattaatagagttatagggttagccccagagattatcaaggtatgccttctgtgtgtttaattaattattgcacccatgtgccacacttttgcctccgctctcatcctaaagctcttcttaaccactgtcactatcattgttgtggcctgagaaactaagccacttgtcaggactgtttgtctaggagcacacaggccttcactgagggctctggagcattcttagcaaaggttttgcagcaaaggtggacatttctcatcatagtggtggtcatttgaagcaaggtctcactcttagcccatgctgtcctcaaatgccaggtttttctgactcaccttccccaa

SEQ ID NO: 120 - DNA, 2068 bp, Mus musculus
atggagaactcctcagcagcttcagcctcctctgaggcaggaagcagccgctcccaggagatcgaggagctggagcgcttcattgacagctacgtgctggagtaccaggtgcaggggctgctgaccgacaagacagagggtgacggcgagagccagaggacacagtcccatatctcccagtggacggctgactgcagagagcagctggatggtagctgttccttctccagagggcgagccccgccacagcagaatggcaacaaggacaactccctggacatgctgggcacagatatctgggccgccaatacctttgattccttcagtggtgccacctgggacctgcagcctgaaaagctggacttcacccagttccatcggaaggtccgccacacacccaagcagcccctgccacacatcgacagagaagggtgtggaaagggaaagctggaagatggagatggtatcagcctgaatgacattgagaaggtcctcccgacctggcagggctaccatccgatgccccacgaagcagagattgcacataccaagaagttgttccgaaggaggagaaatgaccgaagacggcagcaaagacctccaggagggaacaagccccaacagcatggtgaccatcagccaggcagtgccaaacacaacagggaccaccagaaatcttaccaggggggctcagggccccacccctcggggaggcccacacaccatggctacagccagaaccgacgctggcatcacggcaacatgaaacatccaccgggagacaagggagaagcgggcagccaccgcaacgccaaagagaccgtgaccgttgagaaccccaaacttgaagacggcccaggggacaccggacacagtggccttgagcccccctgcagccctgacactctgaccccagcagcttccgagagaccaacccctcagctgtcaggggggccggaggctgagataaagcataaagacactgttcttcctgagcgtctcagggagcggcccaaaatcaccctgctccagtcttccaaagacaggctgaggcgaaggctgaaggaaaaggaccgggacgaagtggcagtagagacaagcagccctcagccaagcaagatggacaggctgatggaaatccttaacagcatgagaaataacagcagcgacgtggatgccaagctcacctccttcatggaggaggcgcagaactccaccaactctgaggagatgctgggggagatcgtgcggaccatctaccagaaggccgtgtcagaccgcagcttcgccttcacggccgccaagctctgcgacaagatggccctcttcatggtcgaggggaccaagttccggagcctgctcctcaacatgctccagaaggacttcactgtgcgggaggagctgcagcaacaggatgtggagcgctggctgggcttcatcaccttcctgtgtgaggtgttcggcaccatgcggagcagcactggcgagcccttccgagtgctggtgtgccccatctacacgtgcctccgggagctcttgcagtcacaggatgtgaaggaagacgcagtcctctgctgttctatggagctacaaagcacaggccggctgctagaggagcagctgccagagatgatgacggagctcctagccagcgcaagagataagatgctgtgcccctcagagtccatgctaacccggtccctgctcctggaggtcatcgagctccacgccaacagctggaaccctctgacgccccccatcacgcagtactacaacaggaccatccagaaactgacagcctgacagcccagccgagggggcctggcaggcagcccgtgggcagctggggccctagtgcacagggccagatggacaggcgcaaggacaggggtggccctggcgggaaagagaactgagcagggaggcaggtagccacggtggccggtctggagccagcggagaaggaggagattggatccctcagaagggctccccgtgcagccccacccccacccacccccaagcctgcgcatgtggcagctcacaccaagggaaagcatgtctcttt

SEQ ID NO: 121 - protein, 594 aa, Mus musculus
MENSSAASASSEAGSSRSQEIEELERFIDSYVLEYQVQGLLTDKTEGDGESQRTQSHQWTADCREQLDGSCSFSRGRAPPQQNGNKDNSLDMLGTDIWAANTFDSFSGATWDLQPEKLDFTQFHRKVRHTPKQPLPHIDREGCGKGKLEDGDGISLNDIEKVLPTWQGYHPMFAEIAHTKKLFRRRRNDRRRQQRPPGGNKPQQHGDHQPGSAKHNRDHQKSYQGGSGPHPSGRPTHHGYSQNRRWHHGNMKHPPGDKGEAGSHRNAKETVTVENPKLEDGPGDTGHSGLEPPCSPDTLTPAASPTPQLSGGPEAEIKHKDTVLPERLRERPKITLLQSSKDRLRRRLKEKDRDEVAVETSSPQPSKMDRLMEILNSMRNNSSDVDAKLTSFMEEAQNSTNSEEMLGEIVRTIYQKAVSDRSFAFTAAKLCDKMALFMVEGTKFRSLLLNMLQKDFTVREELQQQDVERWLGFITFLCEVFGTMRSSTGEPFRVLVCPIYTCLRELLQSQDVKEDAVLCCSMELQSTGRLLEEQLPEMMTELLASARDKMLCPSESMLTRSLLLEVIELHANSWNPLTPPITQYYNRTIQKLTA

SEQ ID NO: 122 - DNA, 348101 bp, Homo sapiens
  misc_feature (1)...(348101): n = A,T,C or G
aacaagcaaacaaataaatggaaaataacaagtattggcaaggaagcagagcaattggaacactcgtgcactgttgtgggaatgtaagatggtgtagccactatggaaaacagtatggtagttcctcaaaaaactaaaagtagaattaccatataatccagcaatttcccttctgggtatatattcaaaagaaatgaaagcgaggactcaaaggggtatttgtagacccacgtttgtaacagcatgattcacaacagtcaaaaagtggaagtgacccaagtgtccatccatgcacaagtgggtaatcaaaacgtggtatatacatgcaatggaatattattcagccttaaaaagaaatgaaattctgacacgtgctacaacagggaataaccttgagggcattatgctaagtgatgtaagccagtcacaaaaggacaaatactgtatgattccacttacatgaggcacttagattagccaaattcatattaacaaaatgtagactagtggtttctaggagctggcgacagaagagaatggagaattgtgttttggtgagcacatagttttagttttgcaagatgaagagttttgttgattaatgctagtgatggaagcataacagtgtgaatttactaatgccaattttaagtgtgcagtaagcatacaattaaatgtttaagatggtacattttatgtcatgtgtattttaccattttttttaataaaaagatttttactattttaaaattataaaataaccaccatgattaggagttttctatacctaggaaatgggaacacatccagtggtagaagattgtagggaatggagaagtgacagtgtggccaacccagaatgctctttagcagaactgaatgcctgtcatagctgacagatgagccactcagaacatgcttgcatttgtcaatgatccctccagctgactccacagtcgactggtttcacaaagcataacactggttgtgatttgtgtctgggtaaccacagcttccagagatgggccctgtccaagaagctggtattcaaaaattacaactcaattgataggagaagagttcactggtactggcttagtaattaaattgcgaggtgattattagtctgctcaggcaaaaagatcacatgtgagtactttaagtagcctaagactaaaaaactcctcccagaaaaaaaaaaaacaaacctgtaactaaattcataccattttctgccaattatagatgccctccagtgactttaaggttgccacagcaacatgcccactgaaaggttgtcttagtccattttgtgcttctataacagaatacctgagactgggtaatttataaagagaagatatgtatttcttacctttctggaggctgaaagtctaaggtataggggcccacatcttgcaaggaccttcttgctgtgtcatcccatagtggaaggtggaaggacaagacagcacacatgagcaagagatcaaactcacagactgaagccctttcataatcagcattaatccattatggggtggagccatcatgacctaaacacctcctagtaggccctgccccccaacgctgttgcattagggattaagttcccaacacatgctttttgttaaaaagaaatgtgttaaataatgcattgggacatattcactatagcatagggcatgattgctaagtcctgaaatatatggatatagcaaagagagaatgtttcacatcttatctctgtgtcaagccaaaattttcttctaggggtaggacaggtgaactgtcaccaggcagctctcctctcttctgtggcgcaatctgaggtcccaagctggcttgccacctctgccactgccccacagggagcacagcagcccggcatttcccctacactgctcccttcccctgggtggtctcccagtccacataagctaataggcatcctcccttgtttttctgaaaacctcctctgccacctctcccaagcagggttccctgaccaagtggcagcttggtgctttctagagcagatcccattcaatcacctagctctgcacaaaataaattcaaaggcttcacacaccctttgcctttgttcaagtcccagacttgctgaaaatcagctgactcctgtgaaggtgataatggggagtaatgctgtgaaccacactgatactgaagacacattccagaaagctgctgatgaggcaaaatttggtctatcaggtctgacattgcatgtaccagacgtgctgctacttaaagaaatgatggctacttcttttgtaaaagggataaccatcttacaaagtgtcttttgtgtaaatttctatttttatatattagtaggtacattttagaatttaaaaagctgtcttgagtcatttctggaaagagtggagtataaacaaatctgataattttgccaaaacggaaaaagaggtggggtgagggtagtggatctgcatgtgagaaagggacagaatgacagctcatgaagaaccatgagaacagatcctgattctgcaagttctactgaaccctcagaggccctgctgaagatgaggatgaggattactgggattagggcacaagccagtgttggatctcacagtctgggtcaggctgggagtggctcccacagtctgggccatactctactgtctacccgcattataactgaaaaacaaaatctaatctcaccctcttgagtcatagaataaagtcctaattggtcaaaacttttgttcctggtcccacacagcctatcacttgggtaacagcaaaaataataacaataataaccaaaaaataaaacctggcgttactataagtccttactatgtgtgaaatgccttgtatacatcatctcctttaagccttataatgacttactgagatatgttctattatttctctcttttgtagaggaaatggaagcttagagttgcccaaggtcaagtggtgataaaaggggaaggcaggatgcaaatcctggtgtctgcctcctgagtccagtcttgaaccaatgacacacaactaactttctggacttcgtgcctcctcctccccattgctcagcccctccccgatgtgagttcccacttctaagctcctgcctgcctatcactgggaaagccccctttccagccctggtcccatcctatcacactcatgcctggctcggttccacttctcccttgaatgtctctctgctgctctagcttacaagggttgccttttccctgaacaatcactctgtctatattacacatatggcacaccttggattttaatattttactgccatttctgtttaaaatgtgtatgtcatctgaactaaactgtgaggttctgtaagcctaaattaatgcccacttttgtgtgtgctggtcattcatattcaactttgaacaaatgcgttatatataataaatactagggtataaaggatcatttaaataattttttaatgttatctataaagagtttttaataacagaaaatatgtgtttaattttattacatgagaaaagcaacatgcaaacatgcataagcaatgccatctcagctattataattccacatgataaatcacgtgtagaaaatttgaaacataaaatatacagggtaataaatagggcaagaaaggcatggaacctcattcagatttagtgactgcatcttcattatttcctgcaatcattttcttattaacaaattagagaatgtgacaaacactcaaaatccagaatgtagtatgtggaccccctactatgtatgtctcaaaatgagccaccagcatgtctgaagaaaatattgtgatatttactgaaatttatttttatgtcaaaaataggcaaaaagagtaaacttccctaagcgcaaaggatcttttgaatcattaacataaatgaacacatacacatctctgaagtctcaatttaaaagaaagaacactttattataaatgcaccattgaggaagaatgatgtttccaaaatttcctgcagctggagtacaggtgctcaccagggactcagagaaggtagatcctaatgtcttgagatgaggggcgtagttaactcactggctctgaggcccacagctctgggtagaccaccacctacccactggctgcgtgccccttggtaagctacttcaccccttccggtctcagtttgttcccctgtaaaagttgctttgccaactaagtgagacaaagcacacaaaaaaagtttcgcttgttgctctgtaaatagtaatagctcaattaatatagtagctattgttctttgaaaggggacttagagatcctggaaggctcaagggcaattattttgcagatatttcagaacaagacttgagcagacaggatttataaactgactgaagagggagacacctgggatagaaaacggaagggcatcttcagcagggggacagtcccagctagagggatcatattggcctaactcctctctctgcacttcctgtctttcaggctgttctagatgtggctcttcaaactacaaagatcggaagtcactcaacctagcgcaaattaaaggggattactacaagaatatggagtgtattaggctgttcttgcattgctataaagaaatatctaaggctaagtgatttataagaaaagaggtttaattggcttatgattctgcaggatgtacaggaagcataacactgacatctgcttctggggaggcctcaggaagttttactcatggtgcaaggtgaaatgagagctttcaagtaacatggtgaaaggagaagcgagagagagagagagagagagagagacagaggtggggaggtgccacatacttttgaatgaccagatctcacatgaactcactcactattgtgaagatagcaccaacggaatggtgctaaaccattcatgagaaatccacctccatgatccaaccacgtcccaccaggccccacctccaacattgaggattacaattccacatgagattcagagggaacacagatccaaatgatatcgcagaggtatatggagtccaagagaggcatagtgagggagaactgaaaaggtaaggaactgaggctactctaaacatgtctctttccctctccctcctctttcccccctccactcacttcttctgcttacttatcttgcactcgacccacctaaaacacaagccttgacctgagcagccatcaccaatgagcagagagaggtttctcagcctcttacttcagattcttacaagaggaattctgattggctcagttcctctgatggagccacatccactcaagtccagcctagcccaagatcccatagatcgggtgtatacctgtggtgtgatcagcactgcctgcccctcccatttttttagagtgtagactggcaaacaaggaaacttgtctcttgcagagatgtggggtgtatctttgtccaggccttcaccatgaacaaggctgtggtgctcacgccaccgacttaggaggtctgaccttgaactctgggagacttgaggaatgtctgatgactcacaggctgacattgaatcagtccatgtccttaaatcttgcaaaaggaaatctgcttattttatattccctcatggacttcagggctttgtttaacaaatattacaaacctttcctgctctgctggaattaaacagcttaaaattcatccttttggctacttaattttcttgcttcttttgccagtgagattataacattcttgaagggagaatttcaggtgtggtgaagatcttagagatcattgaggccaaccttctcattttacaggtgtggaaactgaggcccagagacaggaaacgtcacacagcaggagaggggcaggtgggacccgggatcccgtttcacacactgtgttccccagagtaccttgccatgtcttaggcacagcattgtcccaacaaatattcaattgctttatttcatattctgcttttgcttttctcaagctcattgttctctattcacatcccttctctaccaccgacttcaatcttaggggatcactttgcatgtgcctttcaggtgttggtctttggggttgtgtagtggaaggtgagatgaggcatgggtgaaatttcacctggttctatcaagctgttatctctccaggccaacaccacggtaacagagcgtagacactagactaccaacttccttccttctgcactgtcagtggcctccaaactgcatgatgaagccactctctagctcccacagtaagtcactagttctgcaatgcctcctgggccaacaccgcataacaggaattttggccactgctgaccttctcccagtgggaagtaacaagtggatgtagccccaccttcctcccagaagccttctctgatccttgtagccgactgggaactcttagttcatttgacatcactctcacacagtggagcgcttcattcattttcctgttatctgctgggcatcagcctggtctcagctcctgaaggtaggtagcttctctcccccagcacctacctaggctcccaccaggccttcagtcaatgtgtggactgaccagtaacttttccctggaacagctatggctacgggggtgagtggagagaagtcatggcaagaaaggagaactagtactttttgctattatcttaggcaagtgtgaatgaggagaagcaactccttaaaacaaacagaaacattctgacttttcatttctaggcagacagggaaactcctggccactcaaaatcggtcacaattaaaccaatgctagcatcatttgcttcaggaatctccagttccttcactctgcacccattagctcttccgacccaagcctgcaggttgggcatgaaatcaatcccagagcagagaaggaacaacagacaacgggccacataagccccaggcctcccacctgggggaactctggtctgaggcatctacaaggccttcccctcaaagatccccattccagcctgaaatgcccatcatcagaggccactgaagagagcgctcaataagaagacaaaagtgtcagagttagaggagagaatcagaagaatatcttatatgttaatgacagtttattagactggaggtagagcccagagccaggcactgaggatgtggaaaacaggagggaagtttgggtgggcaggcagcagcaatgcaaagccccaggcactgcccagaggaggcagcattaggtggggcagcagggtagggagcagaggagcatgaagaactttagctgatgtgggttaagagagctaggccaggagcaggggaaggttagaattgggtccaggttccttgaagacaaacctaactgatttcacatattaagatgtgtcaccctcaggaatccttcctgcactactagctctgctggtgtgagtctgcagaaagaaaaattcagggatcatttttgagggccagaaagactcaggacaagaaagggcatcagccatctttgagcactttccatgtgacacagtcagcataaacccacgatcaccactggttctcacaaggccaagaaaagttgttgagtaagtggcccaaggtcatcccttatgaatgttaagtaagctgcccaaggtcacagagccaggacgtatcatgcctgggattcaaacccaggggtcacactgacaccagagcctgtggttcccactgccccctcaccctaggtgcataccccaaacggaggtgtgtgctctccgtggaagcttcacgttccacatgttgctcaacctctagcctctcctcacctctgagggtgcgatttaagcaaaagcaaagccaaaacccagacaattttattcttatttcctttgcaggtggcatgcctgtcacacaatatgtaaaaaccaacaatgacaacagggtaagtaaatgggaatttgctgaatgtgtatattccagtattattatataatattttgtaaacccaggaaattgtccagatgttaaagcatacaaataactcactgctgagccaatgaggcataaatgctaagagggacaaaccaacgggaagagtcaggtgtgcttaaacctgttgctttggagtggacgacggttgcctgccacccagacaactggcctctagtacccactctgtaccgaatcatggctgggcatgagttgcttaactctctgggcctgttgcctccctcctgaagggagggaatgacagccaccatggcctttggtacaagaatcaaatgagttgttctataggatgtgaatgtctatgctgttctgtgtctcaagcccgggagacaagttctccacacaaaacaaaatcccacccatccttcaaggcccatgccactctccatggctaattttttaaattttttgtagagaaggaatcatgctatgttgcccaggctggtcttgagctcctcaggctccaaaactgctgggattgtaggcctgggacctttcgaattagctctcttctctcatctgaagcctttgtaccctttaaccttaatcaggtgcttatcctttcctctctctttgttaaaaatcttagaaattcttgccgggcacggtggctcaagcctgtaattacagcactttaggaagctcaggtggtggatcacgaggtcaggagatggagaccatcctggctaacacagtgaaaccccatctctactaaaaatccaaaaaaaaaaaaaaaaaaaaaaaattggccaggtgtggtggcgggcgcctgaagtcccagctacttgggaggctgaggcaggagaatggcatgaaccagggaggcagagcttgcagtgagccaagatcacgccactgcactccagccagggcaacaaagagagactcagtctccaaaaaaaaaaaaaaagaaaaaaaaacttagaaattctttgctcaagtatcacttcctccaggaagtcttcctgaccctctcccagaccccacccaccctccatccagttggctgctccaggttgtgtggtggggggaatttcacagcactttgtgttaagcgctgacttatcccttgtataatactttcattgactgtagtccctaatactggactgagctccttgagcgcagagactgtgagtcttacctgttttggcattcctagacacacctggtctatggaaagtgctcactaaatgtgaatataaactaatgaataaatgggtttctacagcagtttatactgcatcacacagttcctctaatgaatttctagcccccttccctgttggggcatacagtattttattcagtatttctcctgaaggcctctctgtgccaagctcagttttaaccaaaacattggtgatctggttaagtcattactgaattatccactacgttgaattctcccaaccaccccgtcccagcccttagcttggccgaaggaaaattaattggttgcaaagtgcgtatctaattacaacagccagcccccgacacagagatgctcaaatgttaattataacatatgcatctcaataaccgacggtggcatttagtgcagcattaatcacgccacttgggccccccagtgcatacacaaagctccttttcatctgccattagcacagactttgcactttcggcacggacgttctcatccttaaagcctttcggactctaaaaccaacgtttccctgtaagcctggactgcgcctaagcccccagttctcccaccgcagaggcccccacccagggctgcgccagcgccgtggggtcgctgggcggcgggttttggcgtcgctagactgggctgtcttggcagctaaggcgacatcccgagcgtcctggggccaccctgctctccagggcccgccatcctggaaaagaaaggcgaactacattacccagcaggcctccagccgccctctttcctttcaagtctttgcacgtggccggaggggagggcggggcctgaacgtcactctcctacattctctttccctgtgtcagatcagggatcattttttttccttcctctactccctcccccctacccgcccctccctccctgtttcccttccctccctccctcccctctctgctgggtctgtgcgctggggcgcccgatcccctccgcagctgggacgctccgaactcgaggcaggagtcggctctccggagcctcgtccctcccttccccttccctgcccccttcccccacccccgactcgggcttggcgcggcggccagaggaaccccgaggtgagcatctcctcgcccgtcctcctcttatagtcatctcagcttgctgatcgattcggggacccgggaggagggctgcgtgacgtgggcgtgcttatagataaatccgggaaaaccgccccaaacaatcagcccccttccccccatccctgctcctgggccagcggggtgtccgcacccatctaccatcccctcctccccctcggtggggaactgcactccacagtgtcgccccctccctgggtttgtcccattccctgccgggttccccgccccgcggggtgtcgtggccctggagctccggcgccaaggggggctcttgggggacgcacggctggagcccggctcgctttggagctgcgcggtgtagccgctgtcatgtgccgggttccgacctgggaggaggaaaagagcgagcgcgattcctctcccttttgttttgaagcccgcatttgctgcatcgagcagttggtttagtatcagccaaacttgcagctgttcagaccgcgctccgccgaggtagggagcccgtctcggggtggcgtttgggggccgggggctgcggcactcggggctgcgggagggaccccgagagtgtgtcgccacgccgcccctcccttccccggtgactgattgtgtctgtggcagcgggcgtgtgtgagtgtgcgcgcccgtccccgcgggctcggggatgtctgtggatggctgtcgtctagacagggcgcagccccctccctgcgtccccggtgagcccgcgggccgcggggggagcgggggatgggagcagaggaagaaaccaaatcggtggacccgttgcggtctcccctttggttattcccaacggttgtggttctgttggctttttttattattcctgtcgctgcggtgcaatcgggcctggggaatagatacgcccggcggagaggggttcacttgacaggctctgaaaagccacctctgggtggcgagtgacccgagaggccgtggggtgggctccggctcgggttcatcaggacgacgagcaggtaactgtcccgggcgccggtcatgggggagggcgggcgggggggcgatggcttgggctgcggcgaaggtctggggcctcggagggccgcgtgccggtgcctggatgtggccggagggggcgtccgggacaccgcgcgcctgagccgagtgtttctctattgatggtaaaagacaatcgggaggggggtggtccgagcccgttatctgggcggcgttggctctgtttggttccgcggagttttcagggttggggctggggggtgtgagcaccgcggggtgtgcggcgtgtagaggggagggctgactggcggcgccgcgtgcgtctccaccccgaggagtgaggcgtcgcctcccccgcccggctgtttgtgtgtacacacggctccggtgtgtgtggggggcggggaccgcagaccgcggcgtagtggggacaagcgtgggccccgatcctccgcgcgacctgtcccgccagccccctccttgtctaagtcggggtcgtgtgtccccgcgcgcgcgcgcccgagttacttggagaggggaccgtgcggctgtgggccggggaagaccgtagggtcgcgtgtgctggtcttcggtgcaggagtcccaggtccgctgtgcggccggagtcacacagcccctccctccgcgtccgcgacgccccgtgacccggcagactgggggtccacccggcggcgcggggggttggtttggctgcgccgcccccagtccacgctggggtgaccccgcaccgaggcgttctatgggtgtgcgtgcccgcgctcgccgccgctgccttcgcagaccggggagagagtcagcgactgccaaccgcagccccggctcttcagtctggggacagtgggagcccaagcccagcgcgccccagcccggcccaggccgccgcccgcccggcgctgtgtctctgcggcccgaggattatcccccagtccaggggcccgcgcgaccaaggaggaagccgctggagccgccggctcggccgcggctagagcctccgtagggcgaaagtgacacagcgcgagagagcgccgccgctgctggagccagggccgagaggaaggagccgcccagagcgcagggaggggccgccggctgtccgttcccagttcctcctgcccagggcccgatctgggctgaaaacctcaggaatccaggctcctagcaggctcgggctgcgcgaggagatggcctggctttcaagaaaacccaattatacgtgaacagaatgcaccgaacagacgctagaggatggccaggacacgctcaggttgtctggggaaactcctgagtgtttgacacaggattcgatttacacacagatcacctcatctgtgtcaagtatctgtcctggataatggatgctcagaggcagcaattttgtaacacattctagggcacagtgtcatcagtgattaacagcttgctagaataataatatgtttgtatgaccttacagggcaggttttcttcccccagaacctcccccctcccccgccagatatcatagcatttattaagagggtcctgtgaggtaggagagtattagccccattttacggatgaacacactgaggctcaaaaatgtggcttgcataaggcctctgggtgggggaagggccacattcccccttttctcagcttatggcatttaattaatagtggccactttttttctgagtatggattcttgacacctcaggaaatactgaagctaaaaaatagagtatattatgctgacacatattctttctcaaaacactcttgatttgttaaccattcctaatgagagcagccactaaagaacggaagtctgcattgctgttattaccacgcatttaataatttgctgttggtgaatggatagcagctgtgatacatccagtttctaccagaatcatatgtgcatataataaatgtatatggtatgcctgttcatgtaacacttacctgtgtttgtatggctgtgttcattgagtctttattgaattcaaggagcaaagaacttatacatgcctgcatggatttctcagaattcatgcatgtgaaggctgtcagacagcctggagggttattaagtttagccaactaatcaattaattaaccattcactcaatatgtactgggcacctacatgtttgtgtatctagaagtgcatacaaagaaaacttaacaaatgttaattaagtccagcaaatgtttatgaagcaccagcctcacttaggccagatactctgcttctctacaaagatagtagagcagagatagttaagttgcaatgcaataacacagcctacaggagggaacaaatcataaatattttagagcagtcaccctggaacttagtttcacatatgttggtttcaaggggcccaagatgccagttcttattctagagcaaatgcagaaggaagcgatggggaaaaaacaccttgatagccttgttaccctgaacttcaggctgtttgcaacctcccgggagggcccagaggtatgttcttctgtggaagttaggcagctgatggaaattaccctgaagccaaccaacaggtttctggcgacacggagctaaggagatgttctccgtggtcccgccccagctcagatgtgctgtgactcagggacaggctgtggctttggtcaaggtctcactcaggccctgcctgggtgtaggagtttctgccttacaggtctgtgtaggtgtgttaatacaagtctgctttttatctaatcccaaactcaccgtctggtcccagatattgtcctctaatttcatttctgttttgggctccattgcccttgttttaaggttatgttgtttgcagctcaggtcatgaaggaggaggcaggagatgggtggttaggttggagagagaatcctgagcccagatagagaacaggaggtacaaacatgcaggcaaattgcagtttctgagaattctccacacgtggtggcatttctgcataacttacctgataacacagccccatttgatgtccttggcttggcagggggagggggcgtctacctctgggcctcactgctgactcaccggcaccctgagctcagctgcttcctttcaggtttgggttttcttttgcccctgcctcccgctgtgtgcggtttaatttagaaccttgctataatggtggccttctccctgtgttagcaccgtgctctcagcatgcctctgactttggaattaaggccagagctgtggttcacaacggggtgagaacagacacatccttggatctccggcacccagagctggggaggactttgaagatgatctgatcttcacgtgaagacctgaagcctagggaagtggaatgacttgcctaaggtcatggtgagcccttagcagagtgggtaaaaaatcctggaatttgagatttcatccaatcttctttctatgtaccgtaatgctttctggaaaaaagttaggttcttcccaaagagtgagaactctttatcttcttctctcctgtcttctggttctgggaagggctctgaaattcatttgacttctctttccttcacaactggcccttcctgccttatcttcatctttggcattcatgagcaaatgaaggtctgtatttgggaaatatagggtgtcttggtgtcctacagtgctcttaagcttggtctgtggctttctggccctgaggcagggtcctcaggaaccttttggaagtgtttgcaaagctgggatgcgtgtgtacttttctaggaagagaatctacagatttcatttgattctcaactgactcaagtaaggacaaaactactggtagggagaaggacagaaaggttggatagtggttggttgacactggggctactttaatacgctgcacttgatttggctttacagtttgcaaactatttcacacaaattatcccatctgccttttataataggtggttatcgttatcagcctgtgaggcagttgttgttatacccattttgcagagcaggaagctgagccttcatggttagtggcatgcccaagtcacgagtaagcagtagagcagggatatgaaccctgacttcagacttcaggtccagtgctcagggctgaggtggcttgctgtctgacatcattatgatgaacagaaagccttgaacttcccagagcttcttaatgcctactgttcactcatattcggccacagagccagacccaaatgctcacttacccaaggggtaggggagataaagtatgggaggcagttaccatagcaacgatctgtagagtggagccagtttgggatggtttcatggatgaggtgaatttgggagtaggcctgggtaatggtggaggaggttttaggctggggcaatggcccaaaaatggttagggggcaactaggtgcttggggtgggtagaacagacctaagaggtttacttgatcatcctgcagtcggtgcgagcttcacagtagttgtcgggctgcttttctatgcctgtctttgtgctaggccctggggctatgacagtgaacaggtacagccccctgccttcaagcagccagctttctagtgggagagacagatgcataaacagttccattcaacgtcatgtgggaagtctaggtagagagaagcccaaggcccttacagcggcacagacaaggggcagccacctgctccggcctcagatgtcagggagggcttcctaaaggagacggctcaggagctgaatcttaatggatgaaaaggaactggccaggaaaggagatgggagacgggcattcagggagaaggcatggcgtgcgcagggtgtggaggcatgaggctgcctgggtgtaggaaggaaccgcaagcagtgaggtcaaatgcaaaggcggagatgcagacagcgctcagagtggaggagctttgtaagcctggtttcagaccttggcttttagcctgcaggtaaggcatagaggaaggactttaatcagagaggtgtacagccttgcttggatcggaagggaacaggactgggagccaggcggccatgggactggtgaggcagtaacaggctctccacggcatccaggtcatagggggtgagacctggaacaagggccatgcatctaaggatggaccaaaggtcatacattaaaattagttgggagtaaagtccgcagtgattacttagacttgggggataagggaatcatctcagtggctcccaggtttgtggcctcactgactagatggacggcagctcttaactcaggtgcgaacttctggttgctggagcagggtctgctggggttggggtgggagggaagatcatggtgagttcagtgctccggtattgaattggaattgctggtaggatagtggggtggtgctgccctacagacaatgcactgtgcaagctagaggctgcagaagtgtgtgcccaagctgagccctgggagcggggaagcattggccactgagcgtaaccacggtgagggctgctgtagacaatgagagcagacctcttcctcccattgtcagataatcctttgtcatgccggccgctgtcgtcagggaagccaggcggggatgctgtgtcatgctggaggcccagctggcagaatccagcgacagccaagagcgtgtttcagctggaagcattagagtgagttaggggagaggcatttcgctttttaacatccacagtgagcagagccctgtcccagccccttggagtgtacagagtggggaagccctggaacctgcttccaggagcaggtagttttgttggggagagaagatatgaacatatgaagccactaaaaagctgtaacaaccccagggaagagtggaatgcaacttaaatagagtgttgcagatccctctcttcctgccatacttcatttttatagagctgatgtgttttaggcaaacgtccagtctttgcatgtttgaattctcagaaccgacaatagtgcctggcacattgtaagtgtgtgttcagtctatgtttgtggatctgcagggatgtacccagagttagtcgtctggggtgggaggtcagtcagggaaggtttccataagcacgtccaaaaggggcatcccaagactgatttagaatacttttagtaccacagtggagtaaaaatcttgaaaaccttccaatgacagagcacctagaaaggctgtgtaagctgtagctagcgtcctttcaaagaagagctaagctcatggaatgtaagggaaatccccagggatctcaggcagtgtggacggtgagctccagctgaggctcgtctaggcctgggggttgggagaggtgttgaggggtgcttcctggcctcaaagcccaagggtttgagtcgtgactgcatctcctccgagactagagatgataccaggaatcaagagccctgcctaaaacaggacctggtaaaagtttgcatgctgggagaaaggatggactagacagcagcccgtccgcatgggggatggaaagtgggtgtgctgctttttgtcttgacctggatgtgaggtggagaaaaatcttccctagaaatgtgagacctcaggcctgttagagctttgaatgtccactacacatgtggtccaggaggccctcaagagagaaattagcatgtaaagacttgggggccagtgtcttcctgactgtgagctctagggcatcaggggcctggggagagtctggggctctttgccctttgctgacttaaatctccaccttgggagatgctttgcgatcagggcagggtaagtgagggaggagagagaagagaaagggcagaggtgcccctcggtaggaaccttttaaaagggccttggagacagctgcacaactcggggaggcatgtgcaggatggcagagaaggacagttccatccaagccttcatctcttaggaaaaaacttcagatgagccccgtctaggaagcccagaacattctccctactgcatactcaggtcaggttcttacagataaggtttctttccagggtccccttaagggtgccctgtgcagattgcagttgctactggtcctctagactgggcactacattgtcttcccatgctcagagtctttagttcctacagtttcaaactcaggagacatcttagaggtcatctggtcaaccctccacctggtgtgggaatcctgactgcagcagcgcttggttccaatgtgcttgctgcttgtggccgggagtttattgccttggaggcagcgccttcccttatgttatagctggaaaggccttgtactgagctctggccaccctcctcgctggccattttcacccatggcccctgcagctgttgtgagagatggtttctagacctttcaccatcctgcttgcttctgctggaagggcctccatttgtcaagctgagattctgtgagaatccagccaacttctgtcctaacttacttcacacagaggcagcttttgaagatagatgtgagggtagctgagccggctgcataggcgcagtctgtgatgggggagttctgagaagctttggctcggtgcttttcggatgatcatgagagaggcagcagcacctgctgcaagttccttcctccgacgcccagaatacatttcagcttataagtaagtaacttgggaatcccatgcagggagctgtgtggaatttattgagtgcagggagtttattgagtgcctgttaaatgccaggcacaatgctgggcgctctctgtgtgcctcgctaaatgaaagtaacctctctgagggagacagagaggcagagatatggtaatgcctaactgtagttatgacaattgagccctgaagggattcagaaagaatgtgtgtggttccatccagagtgggtggagctgacacattccccatgctgttcccttatagggccttcccctggggtaggcagtatcatgatctcaccagtagctgggaacacacaggcctgtcccacactcttggggcatttgctgagatacttacacgtttgaaccatgagatcaagaaagtgacctgctagagaattcacatcttggcatgtcaccaaacaggctggtgtttacaagcaaagtattttttacagcatgcggtttatctgtctccggtatctacctacagtaccctgggcactctcaggaagcaaaatgtctttctgttcctccatctccttgatgcttggcatctgtgtgggtcacatattcagcagattgggtaataaagagcatgcgttgcctttgcagcaaggttgcatcagatggctggacgtgcctggatgtgctctgccactggcatgaaggaccctgtgcagacaaggccaatagtgaaggtcagggattccaagaaagcacccagtttctcctcttctccctctaaaaatggtttcttctgcccacattctattgatttgccttaatccttttagctgttaacctttgcctcagtttagtggacacacatggtatctgcagtgggtctggctctaggagtgaggtgagatgaattgaggtaagcctggcagggtccctgctgcccatctgcccatcttgctggggaagacagaatagccttgcgctagtgtaaggtggtaagtatggggtcaggagaatgaaaagggtgccaaggcagccagaagtcggatgactgtgaattttttttttttccaatggataatcatgctgggacacagatataaactgaggttgtcctgggtaggtgagggcttatggacacatgggccagggagggcgtatgcatgtgggtcatacctgacactattatcagacactgttatcagtcatttatactgcagggtgcacataggggtgatgggggaggtgctcgtgcacaagaggaattggcagctgtttccttcctttgcttagaggacgtaggggaaagcattatctgtggggactgaactcagaattcagatggggctcagtttacagccacagggttctatcttatatctcaccatgatctcagtttggggattggggtggaagtatggacagatgaaaaccatcgggcttgtgggatgttattggctacaggtaaaagaacagtgtactaacgatggctttaaaaacaaggtgtttcaactcagccagaagtctaaaggtaggagctctagggttggttcattcagggagtcagcgatcatttcaaggactctgtctaacctaggctgccatcttcagcacattggcctttgttctcaggccagtccccttatggtcatagcatggctgccactgctccgggcatcatgttctcacataactgcgtccaaaggcaggcaggaaggttagattctccttgtctgtcttaatttgtcaggaagggaagcctttcccagaattcccctgctgaagattctatcaagtctccttgaagagaaacgggtcagtacccatgcctccgctccagtggaggaggagaaagcaagtccctggtgctttcgcctcatctagagcaagaggcaagctgtgtttgcaaggaagtggggaagggagcaatggttggctaagcaaagaggaacatttacttcaccaagtttcaagatgtttttatttattgggggggagttagtgaattagctttacttttttttatatctcaatattgttgaggtttttgtttgtttgtttgtttttttaaaatctcaccccctagttctggcaaccaccaacctggtttatatcactataggtttgccatttctggtaattattacttcttaagccacaggtaatgctggtgcataggatcccaggtgttccatggatgccttttttgtggtcccaggacatgggttctgtggtctgttctcccagcagctcctccactttcccgacactggggccaggtggagaaccccagtaggcagaattgtccagagggagggagcatatgtcactggtggcctaggcagcaggactggaaaggcctgagggcctgaggctccagtgggttggtagaggatggcagtcacctttgcaggcagctgtgggttggggagaggaattggtgctcagctgtggcctgcacattctgcagaatgagttctgttgtccctgctgattgggaagcctggccccagggaatgcagggtgtgggaagatggtggtggatgccaccttcccctccccaaaccactatcccctctatacatacacatgcaaacagcccaggccgtggggctgaccatgcaagctaagagacaaatctgtcccctctgggctcctctccactctgctcaggttgtcactgtgtcctcctccccctcttcccacagcacagtctgtgggttgctagagcacttagcacttcccatcactccctgcctcctcatcattccttggatacttgcctatctgtcccctgggatcatgagcaccttgctactgtcctgggagtcatcagggcatttcctatagggctagggtggtgccggccacagggtccatgcttcatggaaaaaaaagtatttttaaggcaagatacatatttctagaaagggacttgttcatttggttatctgtccagattccaaaccagttccgtgtggcactgcacagtgccctggacgagaacttacggatctctacatgttttcctccctaagaggaagaaaggtaatcaactatcctgttctgggctgaattgtgtcctctcaaaattcatatgctgaagtcctaactccagcgcctcagaactggattggtggccaggcctttaaagaggtaattaaggtaaaatgagatcatgagagtgggccctaatctagtatgactggtgtccttaaaagaagaagaggacacagataagacacagatggggtcaacagtgtgaggatgcaacgagaaggcagccatctgcaagtcaagacggaggccttggaagaagccagccctgccaacaccttgatcttggacttccagtctccagaataaatacatttctgctgatgaagccacccagtctatggtggcctgctatggcagccctagcaaatgaatatggaaggattctcccctgcagcttgtggagggagtgtggccctgctcacaccttggttttggacttctagcccccagaattatgagatcatacatttctgttgctttcagccacctgatttgtggtcctctgttatggcagccatggatactaatacacatgcattgtgtgttatgcttgtgtttaggacttcaccccctaagtgtatttcatctttcagctctgagtgtagttgttattcttctcttttgcagatacacctgaaaagttagcattcctcctgaggtcacacagggaagccaggctagaaacccaggcctgtgtggactctggcctgcaagctgttgcatttgggcagtggggagatgtctgtaaacgcagggattgaacaggtggtctttctcctgaaacctgggtgatccaataataactttctttttcttttttttttttggagacggagtcttactctgtcacccaggctggagtgtagtggcgcgatgtcggctcactgcaagctccgcctcctgggttcacgccattctcctgcctcagcctcccgagtagctgggactacaggcgcccgccaccacgcccagctaattattttttttgtatttttagtagagacggggtttcactgtgtcagccaggatggtctctatctcctgacctcgtgatccgcccgcctaggcctcccaaagtgctgggattacaggcgtgagccaccgtgcctggcctaataataactttcaaagcctaacagttgctaagtattgtggtgtcatagtaagcactttgcatgtgctgtcttcattagccattacagcttctgtttcatagatgagaaaatgagggcacttcttccaacggggacatttaagcaagaaaagccagtgacttggccaaagttgcataccaggcttgccagtgagaagacaaactgaggacgggttctctgaactgtgccctcttggctctctagaaagaactgtgtggaaatttctggattcctgtgtcttagtccatttgggctgctatagcaaaataccatagactgagtagcttatgaacaggagaaacttatttcttgggctaggaagttcaagatcaaggtgccagcagattcagtgtctggtgaaggctcaatttttcatagattgcaccgtctcactgcttcttttcatgatggaatgggtgaggacgttctctggggtgtcctttatgagggcactaacctcattcatgaggctctgccctcatgacctaattgcctcctgaaggccccacctcctaataccatcgagtcagtggttagatttctaacttgtgaattttggggggatacattcagacagtagcggaggttgagtgttttaccccaggccacacagctaagaagtggcataaccagttttgctcaagctttgcctgtcacacacagggattggcaggttcccctgtagtcccctgatgttctgaaaaggtcactggtcttagattggccacctgtgatctggctgctctcagggaagtcacttcacatctgggtgctttgtcctcggtgacctcagggcttggacgatataatactaaagtctctgatcctctcattctgaggttcccagtgcccatccttctataatacagggattaggagggagaatccctgagatgtttttgacatttgcctacacctgagggaacagttgcacatcttcctgatacggccagttggaagtgtggtttggccattcattccttccctacaaaattacctctttgcacaaggtagaaatgatccccaccttgtgccaggtttgttctaggcttttgatggtgtgggctttgagtgacgtccacaaaagcgtgtggggagagggttgctggtgaagtgatgtcactgtgatttcctcctctaggtgaaacaaaaacgtggttgcctgcagcctcattcgcaccagagagaagccagccacgggcgtggcaagccttggaggcccaagttgagccaaagacctctgtgtctttccctccatcctgtttccgtttgcctttaggcccaggtggctggcagatgacggtgaggagcgggtgatggggtaattcccggaatgcaaactgtaaccagggcagtcagaacaaggattgttaacctgcagccgcccagctcctggctcatcccacgaggcgttcgtgattttactcacctcattagaaaagtttacttaatgtatctgtcgtagattttagaactggaaaagaggttgagtgactttctttttctttttctttttccttttttttttttttgagacaagtctcgctctgccgcccaggctggagtgcagtggcgtgatctcagctcactgcaagctccgcctcccgggttcatgctattctcctgcctcagcctcccgagtagctggggctacaggtgcccgccaccatgcccggctaattttttgtatttttttttttagtagagacagggtttccctgtgttagccaggatggtcttaatctcctgacctcgtaatctgcctgcctcggcctcccaaagtgctgggattacaggcatgagccacaaagttcctgattctctgcggcccactcatgacctcagagctccagactcccaagctccctgacaccagtatttgggtggatgggaagaggcctgcagattgcagtgggtgaagaggctgtgcacacccagctgctgtggtggagtggctgtccgccagtgtgaccagctaagttgtcttctcatttcttgctgttgttggtgccaccaggggtccttacccctggcattgttgtgaggtgcctagggagctggcagggctagtgcacttcttccaatgggaacatttaagcaagagaaaccagtgacttggccaagttcgcataccaggcttgccagtgagaagacaaactgaggactggttctctgaactgtgccctcttgcctctctagaatgaactgtgtggaaatttctgggttcctgtgtctccctcaggaactggctccaggctgcccctgtacccagcggcccttgtctgtctcctcccaggccgaggcaggcactgcgatggaggcaccctcttcactgtgtttgccagtgcactgcagtggagaggttatgcctttgtagggttgtggggatagggctgaaagccccctgaaggcaggatccacgatggaggagcattatcgtactctggtgggctgggaacatggcccctttcccaagttctcctctctgtcagcctaacaccagcttttcggagagaaagaatcttccaggtttcctgagatttgcctgaggtccctgaggctctccttcccacttcaatctagaagatgggagaggctctaaatgacttaatcacagatctgaaagcccagaaggacctgagagaggcttggcctcctgcaggcatctgccttgtagcctcccgggaattggaagcttacagctttgcagcccaggccattacttggcagcccgggcctaaagacattatcttagaccaaggtgtgcctcccagtagccctggctgtgatctgagaggcacacagaacgcatatcccattctccttccagggtgaccaagtattcagagtgccaaatcttcttttggaggtaagctctcttcccttaaggtttctctggataaggtgtccaaacctctcctggcttcccttctctgtacatctcttttatcaatgcttctcctaaaatggggacacggaatggaatacggtgttcgaggtgtgacctgagtggtgcaggaatcatgctgctgtcacctccctccatctggacactatatttctgttaatgtagcccatgactgtgtaatttttcttcatgggcagcttctagatatggggattcccattccttcacagctcctgccaaaataatctgtggcaaagatctgtttccccagcctggactgttcacagccctgatgagtagcccaggccacctcatctgagtcccctttgagtggcccagggagctaaggtcaagggtgttcagaagctggtgagattattgaggcctgacccactttgcagaggaaggctggagctttctgcccaaagtgactgtgatggggattggggtggatgggcttccaggcctggagaaggtggggatgtttcatgcaggctcctacccctgaaaatctggccacccactcaccactgggaaccagctcctgtgtcttagcactgccacctccccctgggcctgccagcctctggcttcatttcttttttgctcaggaagcagagataaggtttggtgctcacctttgcccagttgcatagagaccctgtgacatggacatattggatgacttccctggctgagccatggaggaaactgtgtttcaactgaagacattcttgtggtgtctgcccccagggaagtctcttggtatgtgtgtgtgacacagggctcagtttggggcactgggcatggggaatagggggcaaaggaaaggaagactcaactgtgctttcagggagccttcagccagcaggagagagaaaccctgagcatgctggctgatgggaaatgtgtatcaaaagtttccttttgccaggaggaggcaggcaggactttcagctccccaagtctgggccatttctggaagcatgagggtttggagcttgtctttttattctaaacattgagcctgcagttttaactcctgggctgcccgttggtcttgtctgtcctgagctgcctgcacatcgatctgatcgtgaagggtgggtggtgagtgctccggatcgtctcagcagcatctctgccttagatggattctcagctgcccatctggaaggtcaggatgccaataggtgggggcatcactgtggagtggtagcgaagaattccagttttgaggctcacgagcttccaggattccaggcttggctctgcataaagctcactacagaatcttaaactctttgtgacttggtttcctcaccttgcctttgatagtggagttggaaagccccaatgcaaggggaggtgatggtctgctcaggcaccccgccccaagaatagagatgtcagtgattcacaggtgcacagagaacaagctgggacatcctcaaagtacacactctggagtgctgagaactggcttgttacccactcagctgctcactggcattgtgtttgtttgtttttttgagatggagtctcaccctgttgcccaggctggagtgcagtggcgcagtctcagctcactgcaacctcttcgtcccaggttcaagcgattcttgtgcttcagcctcctgagtagctgagattacaggcacgcaccaccacacctggctaatttttgtatttttggtagagatggggtttcaccatgttggccaggctggtcttgaaatcttgacctcaggtgatccacctgccttggcctcccaaagtgctgagattacaggtgtgaacctccatgtccagcctgctcactggcattgtgaccttaggagagttaattttctaaagctctgcttctccagctatgagattggcataacagtgtctacttcataaggctgctgttagaatgagaactaatatatgttatacacttagcccagtgcttggcatggagctgagtctctggaaaggatggctgttcttatgatcataggcaaatacagtgtggtcagaagagtccagcagggactgaaggaggggtggggctgtaaaagcagatgggattgcagaggaggggagattgtggcctgggggtagggacaggaggatggtggggaagagatagagaactgcagaaacagtaccttgaaggccccctgcaaaacttgtttggagacctggaaattcacaggtgtcagtcacccttgggctacagagggggctggaactcaggctggtcatgaaccattttgtgcccccattgtcccagccagagcttttggatgagggataggcacgtgaccagagccaggccaaccaggaaccttccctggagttttctgaatggaagctgggagagaaagtccttttcttcttgagggcatggcatgaaagaagcctggcagctttggccacatccactgccgtggagagacctgtcctggggagacagcacagcactagcagctgaagagaagcagagctggaaacttaagagaaccaatacctctgctcgatttgtcttcctctggcttggtgctgaatttgttagtttctatagtctctgtattagtccgtacaggctgccataatgaaactccacagactgggtggcttaaacaacagacattttatttcttcacagttctggaggctggaagtccaagatcacagtgctggtaaattcagtttctggtgagggctctcttcctgccttgcagacagctgccctcttgctgggtcccacacggtctctcctctgtgtttgtgcacatgggaagagacagctgtctggtgtctgttcttataaggacaccgcttctatcctaatcagaccccacccttaggaccacacttaccctttatgacctccttaaaggccctgtctccaaacatatttatgctggggattagggattcaatatgtaaattttgggaggacataattcagtctgtaacacttctctattcagtagattccctttctttttcttttcttttcttctcttttcttttgagatggagtttcactcttgttgctcaggctggagtatattccctttctgtgccttaaggaatggcattcataccactggtagaacacacaatgattttcagttagatacttatggactggtacaaaatataagccatgtattcatctatgtgtgcattaaagaatgacaaacacaactagtacatagaatttgtgatgttcacaagtgaagggagtattcagtattgctctgcaggaggctgagtttaataaaaagtcagtacaaggtcaatagtaatgttacagttggtacacgggtatgacagaaaactccaaggtagtgaattctgggtaatgttgcatgaactagtttgggttgggtttgtgtcacttggcactggtagagttttgaataatacatgttcaatttcagcctaaggctacctcttttcatgtaacaaatatgggttcctaaatgtttatttacataaaacctttatacatataattgtaatttcgagtcacaaaaagtggtcagcacctaaagacaactgtagtaaatatttttgtaaagaatccttttttatagtatctggtttgtttcaaatgcatctgttttgcaaatttagattcttaaacagcaacttgttatctaggattttggtcatcagaaacttctcagctggcacctgaaaaacatcagcacagtgacagttgatatatttaattgttcaaatgatcatcttagcatcaaacatgctgcaataaaaagtgttctctttgacatccattctccaaccaataataaatacacttattcaaaagttaagtaaggggtgtatttgagagctaacccatcctggtaaactcatactggaaaacctgataagcgtttgcagatctttttcagaatctgtaagagttatgttgtaggagagataatcacctgtagcactggactcagcatttttagactagaatatcctctcccgtcttgttgagtgatggtgatcatattttctgaatcaaaaatcaggatgagtatttggatatttgaaatcagaacttctcctaactatcatcttttatctagatggggactctggagtctcattgtcaaatttgtttatgtgctcatacaaattttaaaaaagtttgttgttgtttttttttttacttaaaaaattggccctaccttcagaccatcctgagacttatttcctcatcctagttttccccgaatatcttagctcgtttattaatatgatagaatgttaaatgaggtctgtagtcctaccaccccccccaatcctaacaaacaaaagaatattttctaatgttacctgtggaagcagatagcttggtgggctgaataaatgattagaatttaagagcctagttttaggtattctagttactgtaggctgtgtgaaaaaccaccccaaaacttagtggcttaaacagcaataatcctttgtcctgctcatgagtctgtaatttgggcagggctcaagagctacagtttgcatctattccacatggcatcagctgggctgcaatcagagctggaagatccacttccaaaatggcacattctcatggctggcaagttgtgctggctgttggttcttctccatgcaggtttctccacaaggctgcttgggcttcctcaaagcatggtggctgggtttgaaaagttaatcccaatgtagagtggagtaatagacattggagactgtgaaaggtgggaaggtgagaggcgggtgaagatcaaaaaacgacctgttgggtacagtgttcactattcaggcatgagtacactaaaagcccagacttaaccactatgcaatatatgcatgtaggaaacctgcacatgtaccccctaaataaatacaaataaaccaaacaaaataattatatattatgaccaagtggagtttatcccaagaatatgaaaaaaaccaaaccacaaaagtgaatggcccaagaaacaggaaggagagacggctaatttcttaagggctggcatagaaatgccagttatctaacagtctctggagtgtcacttccatatactactggtcaagcagtcacagagtccagattcaagacggtggggacacagaccctacttcttgttaggaggaatttcatagaatttggaggctattttttttttttttttttgagacagagtctcgctctgttgcccaggccggagtgaagtggtgtgatctcggctcactgcaagctcgcctcccaggttcacgccattctcctgcctcagcctctggagtagctgggactacaggcacccaccaccacacccggctaattttttgtatttttagtagagatggggtttcactgtgttaggcaggatggtctcgatctcctgaccttgtgatctgcccacctcggcctcccaaagtgctgggattacaggcgtgagccaccacgcccggcttggaggctgttttaaccataacaactggtctcacaaaaaggaatatccttccttctttttctttgagacagaatcttgttctgatgcccaggctggagtacagtggtgtgacctcagctcactgcaacctccgccttttggcctcaagccatcctccctcctcagcctcctgaggagctgggtcttcaggctcacaccactgtaccccacaaaatttgttgtattttttgtagagacagggttccaccacgttgcccaggctggtcacgatctcctaggctccagtgatcctcccaccttggcctcccaaagtgctgggattctagggatgaaccactgcccggcctatccttccttattacagaccttccctgaggtttagattcatcttctacttgcagtcttttgtggaggagtgaaaaagaaatgtttggctgggtgcagtggctcacgcctgtaatcctagcactttgggaagctaaggcaggcagatcacttgaggtcaggagttcgagaccagcctggccaacatggccaaaccccatctctactaaaaatacaaaaattagccgggtgtggtagcacatgctagtaatcccagctacatgggaggctgaggcaggaaatcacttgaacctggcgtgtggaggttgcagtgagccaagattgtgccactgcatttcagcttgggcgacagtgagactctgtctcaaaaaaaaaaaaaaaaaaaaggagtgtttataaaaacttgcttgtatcatttgagctcagttatagttagtaaatgttttgcttgaagccccttttatatgctaattctttaaaagtggctaataatttaaaagtggctcccccttgtcctgggcatatagtggagctttatttcttcagccattcccagaaattgctgagactgggaagtgcaggctcttggctttgcagcaacggagtctttcgcagcaagaccatccacagttaagacccttctcagagaaactccactgtggcaagaccctgtgctggctgctgggggctgcagatatggatcaggggacactccatccctgtgccccactttcaggaagcccaaagtatcactgatggaaagcaatggcctcagtgtcactttttctcagggtgtccttgtcccctggcagaacacagtggaagtgtgtctatattctgaatgaactgttgactacttctcttttccttcctggggcacttgattttagaaagtgccctggtctaggaggaccaagacctggcttccagctgtgtcagataattacccccactctatttttctcatcggtaaaatagggaatttggtctaggctgggggttggcaaactacaacttgcagactaactccagcccaatgcctgtttttctaaatgaaagttttactggaacacagtcatgcctgtttcttcacgtacatctacggttgcttttggctggttacaaaaaaaagaacatatggctcacaaggcctaacatatttactgtctggccatttacagaaaacacttgctcacccctgatctaaaacaatggttttcaacttcattttagccatactgttttttttctggaaacaactcttctttatttttaacaataaaagcaattctcacagcacttggcatgtgcctggcactgtaccaagtgctttaaaactgttaacttactgcttaatccttatgaaaacattatgagatgagcagtagtatcatcacccacattttagagaggagaaaactgaggcagagttaacagagaggttaagtaacttgcctcaggtcacacagctactaagtggcaaaggcaaaatttgaattcaggagtcctgctctagagtttgccttcttatccactgggccatgctgcctctcactggtggccttatataaaaactgggtggagcaggccccactaactagaactgatgtggcatggtcagcatctcccccttgcctgttgactcttctttctgcagccccccgggatctcagggccatctctggcaacctctggaggctataacatctggcaaattaggcttctaagcttggagaggggacatcagtttgttttggttgctacaagaggaattgatcctggttgttgggaacttatgcaggccaagaactgtagaaagcactgttctctgggactgaggactccagacaaatagactcatttttatcgagcatgatcataattatgcctgataaaaatgagtgctagagacttaggtccacatttcaaaaccgtaactgaaaggaagacatatttcaatagttgccatgccccacacaaatatgaaaaccagtaatctattggaaccagttccctgggccagagtgatttgccttagactcttgtcataaaaatcagcaaaggagactgcacactgaaatgacacttcacactgaaaagatattgacgctgaaaggagattcacgctgaatgtcaccttccctgcttcctcctgcaaatgaccccacatagcctggggggcatttaggagctttagcatagcacccgcctcttgggcaggtgggagcctggggctgcagaccggccctttcttaggatgctccctgtttgcagattagtgacttgattggcccctcctccacccccaccattcccataagggactggttagtctgcagggatgacacccagcctcctccacccttggggatgtaaactgtactaggagcaggaaaggctggggtgactcactttcctgccagtgaaaagctgacctcaatcttggtagtggtttgaaggtgacttttgtattcatctctctgggatcttgggagacagtttcaactatggtatctactcagtttccctatgggaccccactctggcctgcagctcctctgccctgtacagaagggtctcctgttctaaggttttttttgttttgttttgttttgttttttggacagattcttactctgtcacccaggctggagtgcagtggcgcgatcttgactcactgcaacctccacctcctgggttcaagcaattctcctgcctcagtctcctgaatagctgggattataggtgcacaccaccacacctggctaatttttgtattttcagtagagacagggtttggccatgttggccaggctggtcttgaactcctaacttcaggtgatctgcctgcctcagccttccaaagtgctgggattacaggcgtgagccaccgtgcctggccctgttctaaggtttttgctgtctctgttttctccttggttggcctgtgcctgacacagtaagatttgggacccctgagattgagtggggtggggtcttcccaggtgcttccctcttgcttgtggtctctggccctgttccccgccccagccatcagcaccagtcccctaccccctcaaaaggctcaaagacttcctgagaacccggaatctcagtttcatctctgctggagatttttgatctgggggaaaggctgctctctatatggctgctttcagaccacacttggctctcccttggtttagccaaattggggttttcctcattttcaggagccagcttttctgaagtgttccttcctggcagctgcattccccatggtcctgtctatcttaggggcaaggacttaggcatcgggtgtcctagaggctagaagattgttctacagagaaaagtggttttgtggccgtaggtggtacccagacgtgttgcctgccacctgggtgcaagcaggaccggacctctgtgggtggtggagggagcttcccatgtgtggatggaggccttgctggggaagggtagatgagtacagctccgtgtcacagcccggggacagccccacctgctgcaggcggccttcgctaggcctctgtgaaggtccccaaagcctggctctcctgtggcttatcctgggagaatatttgccctctttcatctaatagttaactattgacagaacattaggtacttgaataaaatgaagctgtttagtttggggagatattttggaaaacagaagcttagttctcattgaggttaccttcttggtgtaggtggttgtgtaggtttttgttttgttttgttttgagacagggtcttgttctgtcacccaggcaggagtgcagtggtgcgaacacagcttactgcagcctcgacttcctggggtcaagtaatacttccacctcagcctcccgaggagctgggaccacaggcgcacaccaccatacccagctaattttatttttttgtagagatggggggtctcaccttgttccctaggctggtcttgaacccctgggccccagcaatcctcctgcctcagcctcccaaagtggtgggattacagatgtgagccaccaagcctggtcggcttgttttaaacaacttaatgttattgaaaatatgatgccaccctgatattgagataaattttaagggaagaatcacctctttctcattacttgaatactgtgttaatttttgcatattaagtcaatttcctcctttaatggcaattggttgatccatggtcatgttaaataattttgcatatttaattaactcgggtcttgatttgtctccggtcctgtttattactgatgtcaccgtctgtgtgtgtcttgtgatgtggagactttgcaagctgttttccacggagtccaagccccacagccctgctgtggcactgccttcatcagtgacgcgttcttggcggagaggatctagttgtagtttgtgcttcctggctgtcaagggccttgccttcccttctacaggaaacagctgagaaatcgctggtgtgctgtagccttaaataacagcacctgccactcagttgtgttgtctttcatgagttttccaagtgctctcctgccttggggcatgtgggaaggaaggtattatcatttccgttttacaaagatcccccgagagactgcaagtctcttggattttgctgctgacaccaggacaggaggtcacatcctctgaccctccatcttatgttctttccagcagccccagaaccagccatggaaaccaggggcagggcctctgtgctttagttccctgatctgtaaaataagggatcataatagtacctattttgtagggtcactatgaagtttagatgagctgccacatgcctgggacagtgcctggcacacaaccatgcaagctctcaggagggtagtgccccgtacctccaatcttgttatgtgggggacagacagatcatctggcttgggcgccccaccctgccatgcagataaatccatgcccagataacggtcatgtgggatgggaaggtggggctctagcgtgtgccttcttgctgtcctgtgctaggcatcttggggtccggcctcctgaacttgtgccctttcctttgccagagtgagttgcccaagaggctgagggtgggcatgaggctgcttacaaagctgagctgatgatagtttgcagggcacagcacccttcactcagggatgctggcatactctgtgggcttcttaacaggcaacaagttctgccagcccattgtacagtccccggctggctgcagtgtctgggcattctgcttctcagccttgccccactcactactttctcagtgagtgtcagtgagtaaacacgcacgcaaaagaataaaaccatcaacaagagaaagtgtggtgtgtaagggaaagggagtcattcattcattcattcattcagccagtgttgactacagtgtgccaagtcctgttctagctgctggggtgcagtggcgatcagggcaggccctgccctcatggagcttacagacaagaccatgacacaggtgcatgctatgaaaatgagtgagtgggacatactgggcctccccaaagttggtggggaagagagagaaggtaaaacccaaaataggttctgtgactggccagcacctcaggggaggcctttcgaggggcaagggtggagattttcatggctaagtcctgttgtctaggggggattgcccttacagggggtctgcatgacattagtcatgaatccaaggtcctgtggtggcatcagggctggcaccaaccacagcttgctgccgatgtccctcccatgctctgggtacctgtcatatttgacacctctgttgcagaggtgacagctagaaaagcatccattgcctttggggtgggggttcccatttgttgtctcatgggaaggaagggatgctttggaaaggctgtggaaacccctttgggctctgggtggataacatgagtggggccattggaaggggtaaagaatgctgagtcatgtctaaatgacagcacttcctgggcactcctacatgacttgcaataccccacaggcagggcccttcatctcagcctgtctaacagactgtggatttggattttcattcaaccattaaatttttaaaaaattctgtgaagctaatagtcaaagggttagtagtctcatttattcaccagatatttttcagcaacaacttatgtacctggcttttttctaggagttggggatatagcaggtgaacagaagagacaataaatcttgccctcatagtctagccttatgatagcagaagtctttctttaaagaaagatccctggaatctttaaatattaactcctggagttcacgtaggcatcgtgacagaggcacagggacagtggggttagctgggatgtccagggacagaaggaaacagaagcagtgtcactggtgaccagtcagatgggtggacgtccagcaccctcatgatgtggcagaagtcagggaagaacgatattctgtttaaaaagttgagcttataaatagccatattggaacatgtttattatgttgaggaggtaacttatacttgactggtcttctaatagagcagcaaatgtcattgagtattttctttgtgcctgggtacatggtgcccatggaaagatgtgttctttgccccagggacgacgatagttgagtaattagcaaataaaacaagggcaagtctattgagagccactttctatggcagggcctgagatcactatggaaataactcagtaagagcagtcagagaaggcttcctggaggaggtgtctccatgctagtcagaaagaagtggggaacgtgttctcagggagttagtaacaggggagcatggcttgtgctcatgggacagagtgactgctctgtcacagtggggttggcaatgaggggctagaggttagagggcaggggacagtggagaccagtggggggcttgacacactctgcagctgtgagccattgaaggttttgcagcagagcagtaccctggtgctggttgtacttagggtgtcagcgaggtggagcgagctgggagggcaggtatagcaagtgatgctggagagaacagctgaatgtggctctagagaaacaggctcctgcctggcaagtcacagggttgtgaataaatcactcatgctttctgagcctcagttcacctcatctacaaaatgaaaataagatttcaaatcctatttcatagattctttgtgagtcttaactttaagaatatatgtgacaatgctttaggaaaaaaaaaagtaaagtgtaaattcaagaaaaatctcagctgttggtgtcaggatccccttctcacattggcttcctgtacctatgagatagcaaaaagtaggggagaaatctcatattcctgtgagtacatgacattatcgaaacaccagaggaccagggaggatggtcagtgagctcacaagcattgatgtctgccatttgcatttaatcctcccagcagccccatgaggtggggaaacattgggaatcggagatgaacagctgcggcccccacccaaggtcacttagctagttggtgagacagggccctgacaggcactccttctgtagtagtgtgcctgggctgccatgacaaaatcccacaaactgggtggcttaaacaatgaacatttattttctcataattctggaagttggatgtccaagatcaaggtgtcagcagggttggtgtaatagtccatttttatatcactatgaagaaaaacctgagactgggcaatttgtaaaaaaaaaaaaaaaaaaaaaaaaaaaaaaaaaaaaaagaggtttaatggactcacagttccacatgtctggggaggcctcacaatcgtggcagaaggcaaaggatgagcaaaggcacatcttacatggcggcaggcaaaagagtgtgtgcagaggaactgccctttataaaaccatcagatctcgtgagacttattcactgtcacaagaatagcacaggaaaaacccacccccacgattcaattatctcccaccaggagggtccctcccatgacaagtggggattgtgggagcttcaattgaagatgagatttgggtggggacatagccaacccagatcagttgctctcttctgaggcctctctccttggcctgctgatggtcaccttcttgcagtgccctcatgtgatttttcctctggctctgtctgtgtcccagcctcctcctctcataaggacaccattcaaactgaattagggtccactgacatgacctcattttaccttaattaccactctaaagtcttttcttcagatgcagtcatgttctgaagtactgagggttagggcttcaacttacgaatttggtgagttcacagttcagcctgtaacacatttcttcaggatttccagagcgtgcacagttttgagcagaaaaacgcactgctggaggaaaaggagagaactggaaaattccagcaagctgtcatagacttgatctgggggaggtggggccccactgagaaagatgacaaggtgaacaaagatcagcaagtgattcggtgcacccagcaaacttagaatagatttacttcaagaaattcataaatgaaaaaaaaacaaaaaaacaaaaaaaaaacttgggtttcaaaaaatttctattaacttgctttataaaaagatttcataacagggttcctttaaatacccagccgcaccagtgtacttaacaagtgatttgatttaataccatgtgattaaagcactacgtttgcagagcctagccattaaaagcaggacagacaacctgtaattaaaattttgctgaaccctcctcctccaaagaccagttcagttcgcagaggttgatggtgaaagcagccgaggcacttcaactttgctccccagtgtctttgctctaggtcagtgtgcacagggatgagaccagtcttgggggtgtcagcaccagcccctggccccctgcctggggctggcatacccctcctgctgtcctaggacacagcattggcttcgatctattccagcagcaatcttaccttgtccttctttatctctgtttctagggccagtgacattggtctcctcagttaggggcaggcagacatagacaaatgaatagtgacttttgtccgaacttcatgttagcaatttcaacctgcaaacattttacctccctcaccagagctgcaaacacgtggccacgttgattggtttacttccagtcctccctgtgagtggaagagcagagatccaaaccccttgtaaaaagaggtagacaataaccactcccagagctgtggagaggctgaatgggcagaatgtgtataatcagaaaagcacacatgaggctggttcatttgcagagaagcaggtcatgattctcagcgggtaaaagccaacagtgattaggaggaagaactcttgtcatctgggaccgaggaaatggggctttaataaagccagttgctgtttgggtgtcagagtctgagtcctgtccttccatcatcagtacttattaagaacctactgcatgccaggaactgtgctatatattgagggcactaacagtccctctggtcagagagagccttctagcatggaagccttagtccctgccctggcgtgacgcacaggctaacggaggagacagacatccacgcacacactgaggctgccagaaaaagagaatcacagggcactggggagtccctggggggtggggggagcagtggtgcctggggaatcaggaaaggtttcttagggaagtgatgattgagtaagttgagaacaaaatcaaaagtcgaaggggagttactgtggccaagaggtgggagaggcgtgcttaaggcagacggaactttatatgcagaggcctggaggtgagagagtgagtgcagggggtaggggtgactcaggttatagggacccagactttgaggagggtggagggaggtgagggacagggctggagagtggagcggggaccagagtgagaaggccacatgtgtggagatgagggatccagaccttgtcccaggattttcttttggtgtgttgaaaatgttctggagctggatagaggtgctggctgcacaacagtgcgaatgtactaaatgccagtggattgtatactttaagatgcctaaagtagttaatttcatgttacatgaatttcactttaataattaaaaagaaagatatgatctgcaaagtatggaagtattgttttcaccctgtccccacctacccccttccgtcttgccttatgccctcctggaggtaacagtttgggtttgtttttgtttgtttgtttgtttgtttgtttgcccaggctggagtgcagtggtatgatactggctcactgcaacctctgcctcccaggttcaagcaattctcctgcctcagcctcctgagtagctgggattacaggcaggcgccaccacgcccggctaatttttgtatttttggtagagatgggggtttcaccgtgttggtcaggctggtctcaaacccctgacctcgtgatccaccctcctcggcctcccaaagtgttgggattacaggcgtgagccaccacactcggccaggtagcacttttaaaaatattttgtttcccctttcagtgtttcttcatgcatgacaaggaatatattcttattctttcttatatcaaaggtgccattctgaaaatgctattttgtaccttgcttttttcatctaagagaatattccatcagtgtcttccatgccagcacatagtgatcctccttatttttttcctgggtatataatattctatagtatggctataccatgctttattcatccaccccctatttctggatgtttgggtggttcccagtcttttgcttggacactgtatactgtgtagtcaaaggcaaatcactcttggctcctggcctcagggagcctggattagtcagggtctccagagaaacagaaccatgagagagagagagaaagagatttggagaaattggctcatgtgattgtgagagctggcaagtctgagatctgtagggcaggctggcagcctgggaattcaagtaaaagttgatattgcagtcttaaatccaaaatctgcaaggcagcagactggaaactcaggcagaatttttatgttgtagtcttaagccagaattatttcttccttctctttctccttctccttccccctcaccgttcctcctcctcctcctcctccttctcctccttcccctccctcctttctccttcctctttcttccttcctccttccttcctttcttcttgaaacctcagtctttgctcgtggggccttcaactgattggaggaggcccaccaacattacagatggtactctgttttcctcaaaatcaatttattataaatgttaatcacatctgaaaaataccttcaaagcaacatctagatgagtgtttgagcaagcagctgggcaccatagcctccccaagtcaatacgtagaattaaccatcacagatccaagaaggatgagggtaaaaagaccctgggaatgcagaggagaggagcctgggttgcctgtgtggctatcggaggtaaagatgagtcctctcgttttataactgaggaaactccggctcagagaggtaaattaaattgcccaagattacacagctagtaggagctagaagcagaatctggcctgggctagtccagtacaaaactcacatcctaaccccatgggagttaatgctgcttcatacgtggggtgtgtgtcatcctggaggagaaatttgatctggccccagaagaagaaggtgttgatgaggtagataaagaagagtgattggaagctggatgcagtggctcacacctgtaatcccagcactttgggagggtgaggcgggtggattgcttgaccccaggagttcgagaccagcttgggcaacatgaagaaaccccaactcttcaaaaaatacaaaacctagccaggccactaccattagtgtgtgcctgtagtcctagctactcaggaggccgaggtgggaggattaattgagcccaggaggttgaggctgcagtgagtcatgatcataccactgtactccagcctgggcaaaagagcaagaccctgtcttaaaaaaacaagcaaaaagaagggcaattggcattttcagctcagagaactggctgtgcaaaggccagtgcgggaagtgagccgtctcggaggtagccaacatgtggctgaagcagtctttaaggacaagagcccttgcgtctggatcaggaaggctgccctggactgcactaagaggcatttgggcttcatttcagggcctaaagtcacaaaacggcagcctccagccaggtctggctcagcccacagagctgctggggtcagagcagctttaaaacactacgtgcagggcttggaaggccagcagagcacgggacatccctgtgtttcatgacctccccctccccatttattccagtcacctgcctggccctgtgtcctccatgtgacccaggccaggggtctccaaaatggcttactttgcaggaaaagacaaatgtgtacacttggctcattgtctgtttatttttgtacatgtgtaatgttgcactgatgtacagtgtgtacattttaaaaacataccaacaaagaaatttaacaagataagtttcaaaaagtaagcattctaatattttctttctatgacccagtgatcactcaggcaccccacttttgaatccctctaattagatgatggggagttaatgaaggcaggtttctgtgacaaaagctccaggtggtttctgtgacaaaagctccaggttgacacatggtggcagggcggagcttgagaggggtgtggttaggtcaggtcagcggacaagggccatatccagccacccacgctggccattcgcagtgtgccatcactgtgcggggacgggaaggcagcacactgcactgtgaatgtgcaagtatatctgaggacatcctgctcaccatgcctctggccgcctctgtatcaggtgctgtcctgggccctctgacacccctggtggctggtgtcattacccagggggaaggcagtcgcatccccagcagtgcttggccatacaggtcaccttccacggagtggagtctggtgtcaccgggcaccctcaggtctgatttgcagtcatctcaccaggtctcacctcctctcagcaagacctcccctcacctcttctttcctgaaactgtcttccagctcctccttcctgccggggcggcttcctgctgtcactctgaagagggagggtctctgttcctgccgctcttcagttcagacagatgccagctgcccggagttgcacccatttggggataaatttatttttctttccaagtggctttgtggtgaatgggcttaaataattccctgactatcctgtttaaatttgctccctctcccccagttctttgcctcctctgttttatttttctccatagcctgcattatcctgtgcataaaaactagtgcataatattgcattaaaaaaggaaacaaaattaatgtcttaaaacgaccatccttttattatttgctcagagttctgcactttgggcaggagttttagggggtagagagtgggctgggaaaaggtcagggcatctctgttccttgtggttcagcccagggccgcttgggaccctccattcttctctgcgtggtgtctgtgtgtggttagcttgggcctcctttcagcatggtgttgttggctttattgaaaggtgactggcttccctcagaacagaaaagcaaaagctgctagacccggagtcacttgcgctacgtttctgagcatccagccacacactgggaagtgtggcgactatctcgtcccctaggagtgtggtgtgaaatgctgggacactcgatcaatgttagctctttcattagacacagccctggactgtcagagacccagctcttgaggtaggtgacttcctgtgtgacctggcccaagactcactccctctctgaatctttaaaatggggagaatagaaatatgggctagccacatgtctacctcaaggggctgcttggagggccaaatgagataaagagtaatagtgatgacaggtgttgggaactgggtatgaccaggttttcagaattttgctccttggagctcccagttccagacacagggagccccgcctctgccaggactcctgggggcagggtccagggtgcaggggaaaggtcccagcttccccttttgaggtggccaagcaggccgccgtcaggtcagcacgtaggccttgagtccagccacttttgttgagtgtttaaaatttaccagggactttacatcttttacatcttttctcatgtaccctcaaaacagttctgtaatgcaggtgatgctttgccccccgacagctgttctatggcaacacggccgagtaacagaaccagaactccatcttcaacccactgggatccagaccccgtgcctttttcccacaaagctggccagtgacagagactcttggcaaaataccagaattttccttactgtgaacactgccgactttaattagattaattttcgattttcttttgccttcaggggtttaaagctgacccagctggattacagcagcgcactgtgagtggaacagagttgcggtgtcaggacctccaagccctgcaacccccagcacaggctttatttatctatgcacccccattgagaggctccctcaccctctgaggggatggaaggtccgtggagatgcagctttgctctcccgggagggtctctgccctcaggctcagaccggggccgtcctaaagcctccctgccccggatgccttttgatgaaggctgctttgtgcacacacatgtgctgggctgtggccgcaaccccaagccctagttatccacagtaaacacagaacagcaaccaccccgtgcagccttctctctccaaggtaaactgttggagtaagggcttttgcctggacgaaggcctagtcaatgagagtgctttgctgactctaactcttgcttttcaccctggggagccaaccacaaacatttgtggagacccacacatgccaggcagggcctgtgctgcagaaacgtgcactgtggaacaatcggcctcagagagccgccgaagaacaatgcaggcttgtggattgtccctcccggtcctcgggcagcggcgcctgtgtacagagcacccaggtgtgcccccttgccctggcccgagaggcgccgaggatggggcctgtgttttgggggtgtatggtcacttgcactgaggctgcccggggcagggttgacctttggaagatcaaatatgtggccttctgggctttgcccaggccagctgctgacccaagggaggaacactcagtgtcgcgtgatgtgttcccctgtcctctggcctggccattgtcattgcaaagctgaagagatagaagaatttgcggtagctggggaagggaggcggggtactggtgccagtgaagtcccttcttgagatggccttttggttcatctgcggaccttgctgtctgcccatttaggcgctgccctcaccctgggtcccacttgccactctgctcacgttgagagtcctctttctatgcggttctctgcttcagccaacacaaacagcagaaataagccgggagaagccacctctgaatggaggttctttttccagattcgctgtgccagccggggcgtaaccgtttaattgctgacactaagtctctccgtaataccaaatgaaacaaggttccatggtgccctgagtacaggatttgagtatgacactaagaaagcagagaataaaaggacgcagggaggattcggtctgctcaaatgcacttttaaaattctcctatttacaccgtaattccctattctcctccattaacttgttttggtggtttagggcttgtcttttgtgtggttttggttttctgggcttcgccactgaggagagaacattctagaagggtgaaattgttaattattcttaaaactttgagagctgcttatgtggaatatgtcctatgagagcaccttgatattgcaagtcgtggcctccattcccctgggatgatctgcggggacagggtctgcccagagccctggtgtcagggtgtgatactgactgagtttcacaggctggcctgggggagccaggacttgaggttggagacgtgaggagaaaatcacaaacagaaattgtggctctagacaaatgctgcctcatccacctgaggcggggagtttgggtagattggaatctgacctgtgtttccgccccaggaccaggtggtagcaacggtatttaggtttttaaggtgggtgatgtcaaaagccatgtccagaagaaaatagtcttgttggccctattctttcaccctaagagatttaatccagagacggtgtgtaggatcctgctgctgagatgcgccgttccttccccggcttctctcacacctggacttcccttctgccatattttgtttgtctttggccaggacactgaaggatagtgccatagcccctgcgtggccctcatcttcagctctttctctagtacctattttagataaaagcttttttgagataaaaaattcatataacataacattcacccttttgaagtggattttttttgtcttcttgtttcttttgtttgtttgtttgagatagtctcgctttgtcacccaggctggagtgcagtagtgcaatcatggcttactgcagcctctatctcccaggatgaagcaatcctcttgcctcagcctcccaagtaactgggaccacaggtacacaccaccatgcctggctaatttttttgtagtttttgtagagaaggcatttcaccatgttgcccagtctggcctcgaactcctgggctcaagtgatccgcccatctgggcctcccagagtgctgggattacaggtatgagccactatgtccagcctaaagtggatggttttaaatatattgacgatgttgtgcaaccctcaacactatctaaccccaggacatttcctcaccttttacgcccattaccataactctcatttttccccagcttcctcagccctaggcaaccacttatgtgctttctctatagatttgtctattctggacattttataaacatggagttatacaatatgttctcttttgtaactggcttctttcacttagtgtaatagtttcaaggttcatccatgttgtggcatatctcagctcttcattttttttttatcactgagtaatgttccattaggtggttactctacattttatgtattcctttgtcaatggatggagctttgggggttgtttccatattttggctattatgaataatgctgctctgaatgttcaagtacaggtctttgtgtggatgtatgtttctaattctcttgggtatatacctaggattggaattgctgggtggtatagtgactctatattaaccttttgaagaacgccaggttgtatttcaaaatggctgcaccactttacaatcgctttagcaatgcttgagggttccagtttctctacatcctcaccaacacttgttattatgtctttttgattatagtcatcctagtgggtgtaaagtggtatctcattgtggttttgatttgcatttccctgatgactaatgacgttgaacatcttttcatgtgctttttagtgttaaaagctcaggtttagatgtttatccaagtgtatatctttggaaaaatgtctatcaattgtttgcccaacttttagtttggttatttgtctttttattgttgaattgtaagagttcttcgtatactctaaatactagacccttaccagaatttgcaaatattttctcccattccgtgcattgtctttttacttgatgatttgctttgaagcatacatatttttaattttggtgaagtgcaatttatctcttttacttactgtttcattggtgtgcttttggtgtcatatccaagaaattgttggctattccaaggtcacaacaatttacttttgttttcttctaagaggttcatggttgtacaacgctctgacatttaggtctgtggtgcagtttgagttaatttttgtatatgttgtgagctagaggttcagcttcattgttttgtttcattttgttagagacagtgtctcactctgtcacccaggcaggagtgcagtggtatactcatagcttattattattattattattttgacatggggtcttgctctcttgcccaggctggagtgcagtggtgcagccttggctcactgcaacctccgcctcccaggttcaagtgattctcccaaattcaagtgattctcctgcctgagcctcctgagtagctgggactacagtgcatgctaccatgcctggctaatttttgtatttttagtagagaaggggtttctccatgttggccaggctggtctcgcactcctgacctcaagtgacctgcctgcctcggcttcccaaagtgctgggatgacaggtgtgagccactgtgcctggccatctttactgttttacatgtagatacccagttgtctcagcaatatttgttgaaaatgttttttccattgaattgccttttgtttttcttatatgcctctttcctactaaaaagtaacttagttctctccttttcttccccccaagcccacacacacacatctgctagcctgcctcaaagtaccaggcatccctgctgctctaggaaggcctgcattgccagcccagaaccttgaccctaactcccaggtccctttctcagatggatcttggtgtacccaggtctctttgtgtctttattagtctctctggatgctagcattcatctgcttcagggaaagggaatgaaggaggagctgcatgggatcaaaaaaccccacattagtgtgtgtgtatattttttcatgcctatatttctgactcccaaatcaggtgtaaactttcctagtcatgaccctcttggagaccctcatccattcgtacaaaaaatgttcacaagttagataattaaatgaaggaactacgatgtctctgatggacaagtgattcactcaagtggtactccatccatccatccgtccgttcatctgtccatcaatcagtctgtccacccattcatctactgagaaataaaagagctggttgcttggtccctgtctgccggctgggtcagagttctgctacaggtttgtatgttgttagaggctcaggttagctgcccatccaagtggaagccaatttaccagaaagccagagtctgtggttactgtggctgtcgtcacgggtagagtgcttggtgcgggtcactggcactgaggcctttttagtgagtgggtcccctcaggagggtcaatgacacatctccaatcagcaaacaagagttagagcagagggatagtgtagcctcagggccccttcctccgttccaagatatctctgtctagatactgcgcattagaatttagtactgaagaatgaaggtggaggctggggaaacattctaactctcgggggccctgtgccaaccacccgccttcagtggtaacatccttgtcacctttgtttccatcacacctcacctgtgttgctttctacacatcctgaagtttaacttaacctggacacctttgggccccatgacccattggtgggagcaccacactactacttagaaagtggggtttttgactgtggaccaccgttcgggaccctctctgactgggactgtcattcccctgtttaccggaccgtcgtctttctgggtactctgtcctgcctgtcccagtgtgcagggctcctcctcccatcctgaggagttctttcttggaattttggctcccccgccctgcagcttggtttccactcccacctcaaggattagagttctgacctgaacctcagaggaggacaagtcccctgcctggcaggatgtggattcaccagggccgggggcacgggattggatatcaactattccactagctgcaggcatcgcggccccacccagctgacactgctttcgcatgtattgctttccagagatgagagcattctgcagtactgcccgggggctgtcttctctccatttagcaatgcgatgccacaattttgctgtgccattacacatttttccttcagcgtcattccagcatcagctctctaatatccctttttatagattttccatttcacagtgagagaaggtgagacagcaaatactgttttcgcaaatgcaggggctgatgactgagtttgatgtttttttttgtttttgtttttttttgggttttttttgttgttgttgttagattcctgagacgtaccacgtcccagcatgaattgtgtaacttatctgccctgtgtcgaaaattagactttgctcctgtattttcagaaataattcttgacaccctcttaggttttcaggctgtgttttggctctgccctcatcttatctctgggttccaagagcttttttcccatttctctttttttccatggcccatgcctgagttgggttggcaggttctcctcttcttgctgtgtccctgcagagtctctttctggcactgccttaaccactgcacttcatctgaggggagagagaggaagagccacttggctagggaagcgagtgctttctctgctggtaaagatgtctgggagaagggtccccccacccctgtccagtgtgccccaggggtcgggcagccagtgaccccttccacctcatttctttctttttgttgcctgcacaggactggagagctagcatgagtatctgtcctgcaagagcttattaagccctgcttatacacgtggcaccagggaggtgttattatcggtcatagcaaggcagggagggacagcagacgggaaggagttaaagttctccacaaggaaaagtgtgattaagtggcaaagggaatggtttggaaataagtgctgggggctttcaggggaaggggaggtcatatgggccaaagcggggcagaccttctgtctgaggagagtgagtagacccagaaggatgatgggtttggagttgggtggagagggacccttattggacagggaggatgtcactgtattctccctgagggacctcctgtgcgatttggtgtctgaggggccgtctgtttcaagaagtgggaggcgtggtggggtgtgggggctgggtaccctgagagtgtggtgctgtaatcaccctctggccagcaaggaagcatggcaagacttggccgagacagctgccagtgtcagaggaagggtcctgggccggagagtagaggcttggcaaggcggcagggggcaggaggcatgagaagctggcttccatggggcagggcagggaggtcatggaccacgcatggtgtggacacacccgtgggaacagagaagaaggggagagggagacattttcataaaaggtccctcagggcctaaagacaggcttctggggataaaggaggtgcctgggaatggggttgattctgtctggctttctgggggcctcatgcacatgagggcgtctttgttgcctgcataggaccacgtcatgccctcctgcctcagggtcccctctgtgtttcacgtgggctcctgaggcacattgcactgcactgaccttccccctatgtgctgtggtgcctgggcccagagacggctgtgaccttcctggcttccctgctagcataggttagtggtggtgcagaggtggtggtgggagtgcttgcggtagtagtagtggtggtggtaataacggggttagagctgctgctctgcgctaataaacgttttattacctctagttcgtttagtccttagaacaaccctgtggggttggccggtcatacagataaggaaactgaggcatagagacttcagcaattgcctgaagtgccacatctagtgaggggcagagcctggactgaacccccagcacatggctccagactccatgctcctgggcactcttcctcctcagcagagcaggccagcactgcagaatcgctttcatcatgccatttagaaatgggcagctgagggtcagcacctctggtatgcccagggtgtgccccacctctctgccccatgtctgctgtggtggaggggagggaggaggatgatgggggagtgcccagatgggaactgctggccttcagggggccagctgggccattggactggacaaagcctgagcacagccccagttgcacctggtgtgacccccacacatgacctggccatggggaaatctggccctgtctgggtggggccaacagtgctttggccctaagagtcttaggcttcccaaagagtgaggaaggacaaggaggcagagcaggggaaaggaattcacagttcgtgaaattagatgctgcagaaaatgttaatgaatgccctgttatcttaattttctcagagtgtgaagtgtttaggcatcatgaggatgagagtgttaccaaacccaggagagctttgagttcaggtcgcattattcttagatttgtagtttggtggggaaaggagtcggactatttttagagggcgccgatctcggtttgtaattaacagacagtgtgccctcctgctatgcactctcctcactcacactttgctgtaattagtgttttaatcatcttctacaagatcctcaggtccgcaagggcctgcaacatgcctgtcttcttcactaccccgtcctccatgctgggcatatgagcagggagggaggatcgattccaccatgagggcttgtaggaggtgccaacaactgggcagtcgaccagtgggaagttgagcaggtggcaggggcagcctgaactgagcatggatggacagaaggtatgtcatgtctggggaaagcaagtgccaaggatcctgggatgaagttggggaatgatgggaagaagcaggacaggaagtgccttgaatattaagtcactcacttctcttgtgtttagggagacagggctgaaaacacatactttgtagaaagaacaggaacggtttcatgattcttgtcttttatcagacagggcctctataacccttacagcacctttgtgagaatcggaaatagacatctcttatcttggtggatgaattttgaagaaagcggcccctgcctcccctcttcccacccagctggctgcagccttgtaccagggcacaaggcttaacaaatagggtttgagctggctcttggccctcacttgctctctaggatggatatttttgagcagtacacaagctgcgcgactgtatatgatcaccctttgagatttatggtctagatttaggcttctgattggagatagtataagatgggaagcctttctgtgtcacccaactctgattgtcttatttacttacacaattctgttagccatatgttgctgttctttgcacaagaaaccagggactattactactggaggtcaggacctttataagcacattgtccacagttcccaaatgtcctgggccctgaacattgccatcacccaggagcttatcaaaacgctgatttctgtaccccaaaatcccattgtgtgtgatgtaggagctaggacagagtccaagaacctgcattttcataagctctccagttgcacaccacagatctaacccacttctagacaaggaaacagaagcccagagaggtttggtgacttgcccaggccatcccaaactggagaggagacctgagtttggcgatgttcagtgcaggcctcctctgactgtctgcccaccatgctgaacccagtcctctccaagctctcccatctctgacgatctccaaggccaggaacctggctctgtgccattttgtttacaaactgtgcttcctttagccatcaatgttttgtcccctcttagtgtattatcagtactttactgaagcataattcacatacagtaaaatgcattaatcttaagtgcacagcctgagggattttgacaaatgtttatacccctataatcattgccccagatccaagtaaaggtgatttccattgccccagaaggccatcagttgttctgaaaggacagaggcacctattgggggacagagatcacttctgtttgttccatgcgtgtgtctttgggttttctgtaatcttccttggaagggtgaggcctgcggatggggcagaggtggaggagcagtgggaacaatgtgtagccacatttctcaaacccagagcattgtcatgtgccagggcagaccaagctgccgggtaaaagtgctgcatcttcttggggtgttaacaccatttgaagatcgtgcaagaaaatctatctttatgttgaaatatagggatggatagagagcagaatgtaaaactcatttggatattgacgacaaaacattcaccttttagaaagtggggaaagtgggcttctcttaaccctacctctggatccccaagggtagcagtcttgctcctgccctgtcctagccttaaggagagtttgagaagtgccagtgtgtggcattcattgctgaagccattcagaggatcccatggtgttctgtgtgattgagatagggcctgggaatacagcctggacacccacaccatccacacactgggggtgacctgctgggaaggatgacagtactgtttcccctggagacttggcaggtggcgcatcctccaaaactctttgaagaatctacatttttaagacatgaagctgtggacagggacacttggcattttcatcccatccctaggaggggctagagcatccaagcactgcaatatactccagcctgaagaggttctctgggactttgttaaggggcattgaccactgttcccacctcccagggacagaatcggctcagagcgtttcagccgtcgacccagccactgagcacgcctgctactcacagatgtgcctccctttctgtttcatatagattcttttctgatgctttgttttcctgcctcaatttcataaatctttatagttgagttttaaaaaataacttgcaaatgttttccctttgggtgaactcttgcttctgtgtgttgtgatggtggcgatgctgattccaagagctaaatatgcgatgaggatgcctgtcgcaggggtggtggcctctgccctcacttttcctagagacatatttgtaagtgaaatgtcaaaggcatctttggttatttctaggttctacatatatttaacgagttttaaaatactcgtgccaaattgcccagcagaagataggttgcacatgttttcactaccgttagcggacagagagcacttgtttccccaacaatggcgatcagcattcctttccacacttttacttttttttttttttttttgagacagagactcgctctgttgcccaggctggagtgcagtggctcaatcttagctcaccacaacctccttgattcaagcgattctcctgtctcagcctcccaagtaactgggattacaggcgtatgccaccatgcccggctaattttcatatctttagtagagacaggatttcaccatgttggccaggctggtctcaaactcctgacctcaagtgatctgcccacctcggcctcccaaagtgctgggattataggcgtgagccaccacgcccggccttaaatttgatagatgtaaaattgtaccaaagtttcctttgcatttctttggttagtcactgcgaagatttttcaggaatttataacctgtttctgttgcttcctttataaatttgctttttatgctctgctcattttgctatttttgatgtatttatgtctttcttttattttagttagagtcttaatttatagggtacctccttagtttccagttttcaaaaaatattatctctacccagactcagaggcttggaacagattcactccaaagcggtatcaggccaccactcctacacagtgtctttgggaacattagaaaaactgcttcttccctgtctcatacagcaccatcctaagtttagggcttagtgagtggcacccaggtaagttcaacctgtcctgggtcccttagccaggctcccctgttcagaacacagctgtacaacctacacaacccactgtggccactctagtgttgtaaaaagtgaactaagccacattcttttttttttttttttttttaattgagacggagtcttgctctgttgctcagactggaatgccgtggcatgatctcagctcaccacaacctccacctctcaggttcaggcgattctcctgcctcagcctcctgagtagctggaactacaggtgcgcaccaccatgcccggctaatttttgtatttttagtagagatggggtttcactatgttggccaggctggtctcgaactcctgacctcatgatccatccacctcggcctcccagagtgctgggattacaggcatgagccaccgcgcctggctgccacttttaaaaataataacgaaaactccaagccattgagggtacaatttttaatacaattaaacctcccagctaccactgtgggcatcatggtgttctgcatggaatctgattttgcttggcattggtctggtctgtgctgtggcatgccggatagcagaggcctgggagggagttcagaggcctgggttctagtcctggctgtgttactaatgcatggcatgactgtgggcaagccagctttttggggcctcacttttctcatctgtaaaaggagaggctgtgactaagtaaacttccaggtcattctcagctctaaatatctgcaagttcgagttttagctgtatttttcttttttcccccaaaagattatgacacctgtaagacaggttagttttagattttttctttagcatctgggttatgaaaaacaaaatccattttgacgtttttgcattccatcaaatttctacctgatttatgctgttttacgtgtgtctgaaaagaggattacttacacacagccaatcgcctttctccattttaccaaaggcatcttggggtctgtggagtcactgagagaaggcatggatgtgcttgacagtgggaaaatgtggttaaattactctcttggctcatcccaccttttccttctctcctttctcagtaactgtttatggggcatctccccggggaggctcagaactgagcaacccttcgaggacctctgtgccttgtggggagccgggaattactgggaccctcctaagtggcagctccatgggcattcttccttgctcgcatcctcatggcctctcccacagaggacaccccccagcccactctccctgattccactttctctaccaccccaggcctttcatgctttccagcattccccagaacccattctctgtggcctgtcaaaggtggggtttcatcccagccacttctccacttgctctcttcctagaccctctggccctctcaggtggccctgcctggcacctgtgtgctccacaccaggcctgtcttctgagcccaatccagctcccacttggctgccttagggacctctggacctcagatgtctcagaccatgtggtcccaaatctagctcgcgatcctcatccacagtccctgtctggctttcctgtcacctagctgatcccccaaacacatggcatcctgcctctcctgacccctgcccccaccctccctgacctgtctgtcctgcccctgcccggctcgctccacatccgtccttccttctcctggctgcatcttctgaggtctggcctcctacagtctctcctgctcccagtcttcctttattgctttgatccaaatttaaaacaaagaacaccgctgtcctgtggcgggctccctgcgggagtcactgctgtctctttacccttccccatctcaggaggggcccaatgcaggcttgcgcagctgaactggacttatccttgatcaaggtcagacttttccctctgattgttctgccacctcctcagccacacagtggctgagggcaccggacttttccctttcccctccctctctacatgtacccggcgcccctgtctcccataatcctccagaggttaagtagatccaagacccttgggctgcatgtcggagcaaatccagcccaactttttaagaaaaccagggctctgggaaggggcaaatgctgggtcacgtcgttggaggtttgtggcagggactctcatgcctgcgtgtatgagtttcccaggactattgtcacgaattatcacaacctggggggcttaagacagcagaaactcattcttttagtcctggaggctggaagtccagaatgaaggtatctgtagggctgtttccttctgagggccgtcagggggagtctgttccagcttttctcctggctcgaggcagctcccaacagtccttggcatgttagggctggcagatccagggctatgccggtcccctgcctgcctccatcttcacatgtactctcctcttgtgtgtctgtgtccaaatttcccccttcttataaggaccccagtccctggattagggttccagtatgaccccatcctaacttgtttacatctataaagaccctatttccaaataaggccacattcacaggtcctagggactaggggtccaacatgccttttaggagggaggacacagctgagctaatgcagtgtggtccatgtcacttgtttttgtggtgctagagagggaccgtgaggtgtgggtcacactggttcaccttgtgggtggatttagctggcctttgaggttgaaagttctcagcattgtatttgtaagacctgtatcattaataaacattttgctagtcttggatgcttctttgtgtggggggagctgggagatggaggacagaggtcacctgggccatctttccaggtgagattatacatttcagcctagggtggggcagagccacctcacggaagcatcacttttattctttcactttttgtcattttcccctttggaaactaagcttgttcgtgctctgggacgtgcggtcatgcgtccctcactgctgggttgagctggtaggcctgcccctgctttcctttacaggcgagtgcctcgtgctgctgtttttctgattgctctggaagttcattgttgctctggccctcctgacctgtgtctggcctttgcccatgtgcagagtttgtggatcagcatttcaggggtgcgggggcgtggtggtatgcgagtccatagccgtggaagtttgggacccaagcctcatgaggcagaagcctggctctggggctccatatttagtctggaatccagcctcagctgctgctctggggccacactggatgccagaaagggcagaacactggcccggagccagagctaggacagcagggcctgctgtgcagcgcagctggtgcccaaggggcatggaccttgctgggcctgcccggaactggcctgcccctgcctttgtgtcaaccaggaggcctgtgggaaagggggctgggaagaaagtgagcaaacacctcagaattggaaggatcagaactggacagggcctcggagtgacatagtccagtgcaccctttctgcagagaagaaagactggggtggcccagggcggtgacttgcccaaggtcacacagttaatggcagagccactagatttgggcttctggacatcaaatcctttgcccttccctggaaccatgctgcccaggaggccaggccgttatcagggtgggactccctccaggcaccaccttcgccagagaccagaagaggatggccacaccctcgggagcacgcaaattgggaaaaagcagacatccatttcggatgacttcctgcccctctttctgtactacttcccaggctccactggcttctgccactcctcaccctccaccccgcccccaccactgagacctgcttattatgttagtcatttaccccatagtgtgaatatcagtcctctcccagaggaacttggacaacagccatggagtgagagttggagtcagccagacacagccagacacagcattacgggacatgttgcaaggtgcatatggactgaaacaggcagatctcagaaatggaggaagcccctgggacctgctctctcaggaagggaaggccagggagagctatttccaaaccaacctgggaagtgtgggaagatgctcctagcacgtctcagctcctgtctagtgactgatccatctcccttgtccatggagactggctgacccatctcatgttctatagctcagatctactcaggaggcagtccgatggcctcactcattataattaccctgactcttctaaggcagtcttcccatcaccccaccttgtgggtcccaggctggctgtggatgggccaccctctgatgtggtacccaccgctccaggcaatggctgcccacaaggacagaacaggctggcctggagctctgagcaggacacatgggagaagacagactcagcatcaagaaaaggtcaacaccagcctggcaggtccctggccccacgtccagtatgtgcccttacctgctgtgtgaccttggtgtctgaacctttctgagcctcagtttcctcatttctagggatccattcttcagattagaggcagaactgaagagagtgcagctaaaggcttagctcccagtagccactcacatagctatcattgtggtgcgcatttcctcatgcaaccctggcaggtaggcagggccagtacttgtaaccccattttacagacttggaaattgatagttagagtaagtaatggacctacccagccctttgcatttctggtgctgcactttttcttttcttttcttttttcttagagacagggtctcgctctgtggcccaggctggggtgcagtagcacaatcatagctcattgtagcctccagctcctgggctcaagcaatcctcccacctcagcctcctaagcagctggtactgcaggcatgcaccaccatgcccagctagtttaaaaattctttttttgtagagatgggatctcactttgctgccccagctggtctcaagttcctggctgcaagtgatcctcctgcctctgcttcggaaagcgctgggattacaggtgtgagccactatgcctggtcagtgctgtgctttttctactgaaacaccccggtattatctgtgggttttaggagcagttctcacccttgacccaattaacctagataccagtgaataccttattgtaaagctctctagctgccgagagaccccagcttcctgggttggtttgaaaatagctctcctggctgggtgcagtggctcacacctacctgtaatcccagcactttgggagactgaggtgggcggatcaactgaggttgggagtttgagaccagcctgaccaacatggagaaacctactaaaaactacaaaattagctgggtgtggtggcgcatgcctgtaatcccagctactcgggaggctgaggcaagagaatcgcttgaacccaggaggcagaggttgtggtgagccgagattgcgccattgaactccagcttggggaacaagagtgaaaccctgtctcaaaaaaaaaaaaaaaagaaaaagaaaaagaaaacagctctccctggccttccgttcccatgtgggcaaggagtggatgctggggcttggcctcatgggagaagctgtgcgtgggcaaccactcaagtgcagtgagtggattaataaccagcgcgagcctgcctcggccactgtcattcccatgacacgcaacttttgtcattgttaacagttggagactgtgtgcaggcctctgcctggcagtgctgaggatagcgattagcagggagtggcggggactaatcgctctcatcagccgggaagaatccaagcctgcctgccgttcacaggtggcctttagctccttgggccccagggaaagaggaacaaagggaatcgctgcaaaacatctgggggcttcctcttgttccggagaggcaggctgccgcggatcagggaatggaggcagcggggatctgggaggcccagaagcagtggaaccacagctgggctggtgtctatacagcccatgtcctgccttcagatgagcaggaacatttttagaggatgcctgtgaagttttctcctgttcctctcaccctgggcatcatcagggggctctgtatctggtgggagcatggcagcattcaaggtgcaggaggaagctcaggcggagattccctctggtcagtgtacagttggcagaaatgcccgggagaccctcagctggggaacgcacccaagatggagagcaggggcgtcaacacctccgctgggattcttaagacttcgcagaaaagggcaagtttgtagtgcatttgaaggacttggttgaattaaagcaaaattatcctcattattgtcatcattattgatattaataatatgtaactagaaatcttttttttttcttttttttttttgagacggactctcgctctgtcgcccaggccagagtgcagtggcgcgatctcggctcactgcaagctctgcctcccgggttcatgccattctcctgcctccgcctccccgagtagctgggactacaggcgcctgccacaatgcccggctaatttttttgtatttttagtagagacggggtttcaccgtattagccaggatggtctcgatctcctgacctcgtgatccgcccgcctcagcctcccaaagtgctgggattacaggtgtgagccaccacacccggccaattcgaattcttttgtattttaaagctgacttttatgttcttaaactctgggaggttttttgtttgtttttttttttaagatattattcttatttatagatataggaatgaggcctatagatgaaggtggctggctgaggtgagcaggccaaggtgaggatatacctttgcctcaggtggggttagggccaggcccagtgatgctgggaacccattcagatccttttctttcagaatatctggcatttagttatgcactgtgtgatagaggctcctgaacaatttcttagaggactgtttcctatcaaccagatgacatggaccaaagaggtgaatttttacctctcctgtgccacagatccctcctatgaacacaagccccccctcctatctgcccccttcccccactcctgcaatgtgcagcagacagtttctttggtgtcgtgaactgtggctgcagtctggcctacccttttccggcgggtcctgggggatgccttgctcaccggctggcttcctgagcctgcaccccatgcggatgcacggggtcccacactcagaagggttcatgtttggttaatactccatagtcactgttttgaaatttttattttgagcaagaagcccttcattcttccccacccccaccccaccccgccccaactgggcctcgaaaattatatagccagtcctgcttgctccaggccccacagttgttgaagcatggatctgtgctcctgactgccacgtggcaggtctgtgagctggcctaatggctatggagtagccggcagaggcccaggggctgaggcctgagctgtttgtggggcctggcatttagggcagcgtagggatttctggaatgagtcctcacacattctccagccaccactttccaaccctccctccatcccggcctctgccccttccctcctcacttggaaacaccaggtgcacgttgtgaccttgttggcaaaaagcaaggtgccggaaatccatgcacccacagcagataactgtccccctcctgtgcccatcctgaagctggcccaatctgagctccccacaggagtttatttttgatagatcgagaagactagaactatccaaggaacgagaactgccccgcttgggcctcctcctcacctggtgcgttcagtcaggctgcagcatgccctgaggatgtgctgcaagtccctggggccaggctgagagagctgaggcccttgtcttgatgaactgcaggagttgctgtcagggcctgctgggccctgaaggcctccagtctgccaagagggaggtggccgtgagctgagtggtgccaagtctccggtgccaggcattggaaaggtcatcttgacatccgtcttcccttccctgtctcgaagcatcaagtcacaatgaacaaaagaatcagcactaagcaggcatgaggaaatggacccccgagcctggccacccaagggatggggtcaggggacctggcacctgggcttcttgtggcctatccttgggtaagtcataggattctaggattttaaaggtggcaggcaccttagagctcacccagcccagcctcttatccagacgaggggactgagagcaaaggggagagtgggagcggctcccttccaggtctcagttaggattaggattgttggttgtgctgtctattgctgtgtaataaattacccctcaaattaccccaaaacttagctgaaactacgtacatttattttttaattaattaattttttttagagagacagggtctcagtctgtcacccaggctggagtgcagtggtgtgatcacagctcactgcagcttcaacctcccagtctcaagtaatcctcctgcctcagcctcccaaatggctgggaccagcggtgcacaccaccacactaggctaatattttatttttttgtagggttggggtctctgtatgttgcccatgctggtctcgaactcctggactcaagcgatcctcccacattggtctcccaaagtgctgtgcccagccttaaactacatacatttgttatttcatggtttatgctggtaaagaattggagctctgcttagctgaatcccttgctctgggatctctccgaggctgcaatcaaggtgtcagctgaggcaatattcaactgcgggaagagccacttccaagctcatgtgtgtgggtggtgacaggattcagttccttgcagcctgttggactgagttgtccacagttcctctccagcatggcagctggttcatcaaatcgtgcaagctgaggaggcagtagagtcaacaaggtggcagtcatggtcttttgtaactgaatcacagaagtgacatcctatcacctttgtcatactctatttgttagaagcaagtcaccaggttcagcctacagtcaagggaggagattacacagatcatgaatgggaggaggcaaggattattcaacaccatcttagaaagctgcttaccacggtgacatagaacagaaaatccaaagaacagaggtttaaacaacatactcctttatttctttcttacgtctacaggcaggcagctcaggcctcgtgtgagggctctgtgatcacaggggcccaagctctttctatctttctgctttgccctgtgtaatagttgaccgctatcttcaaagttgtctcatggcccaagagagttgctggaactccattcatcacatccacaatccagacaagaaagagaaagtgggaagagcaaaaggcatgtgccaatggaatcagtcccttttccttttcttttctttctttctttttttttttttctttttgggagacagagtcttgctctgtcacccaggctggaatgcagtggcgggaccttggctcactacctctgcctcccgggttcaaacgattctcctgcctcagcctcccgagtagctgggacaacaggtgtgtgctaacacacctggctaattttttgtattttagtagagattgggtttcactgtgttagccaggatggtctccatcttctgatcttgtgatccgcccacctcggcctcccaaagtgctgggattacaggcgtgagccaccgcacatgtctggaatcagttcctttaaagggttcagtaacttccctttacacctcattggtcactcctatctgtgagggaggctgcaaaatgtagtttttctctaggtacattttctcccccagtgttataaggattctgttaataaggaaggagagaatggattttccagattcaactagcagtgactgctgtttttaatggctcctcaacctgaaggtgtaaagccatatcttccacctccactgcatcatgtgggccctgccccaaattcctggtctcctggggatgctgagtgggtggaataaggggcaaatgttggaggataaagttctagtgcaacataggatagaacagtgaacgaagaagtgtaacatcaactggcctcttcgttcactgcctcattcatttatcatcgatttgctgactgcctaccttgcatgaggcagcaggaaaaggaggaagacatagagttaagggaaccacagcctccagtgggagacagacctgtgactggatagatgaccagtcagctaacagtcaccagaaagccagccctgggaaggaaggcatgcaggctgggacttgaagggtagtgatatgtgttgaatatgtgtcccctctcaatctcatgttgaaatatgatctccagtgttggaggtggggcctggtgggaggtgtttggatcatggagatggatccttcatgaatggcttggtgccatccccttggtgataagcgaactctctccctgagttcacgtgagacctggtttaaaagtgtgtggtaccctccccccgccccacccctgccttgctcctgccctggccatgtgacgtgcctgctttcactttgccttctgccatgagtgaaagctccctgaagcctccccagcagccaagtagatgctggtgcaatgcttgtacagcctgcagaaccatgaaccaatgaagccttttttctttataaattacccagcctcaggtattcctttatagcaatgtgagaatggcctaacacaggtggatagcagttgtctgggcagaatgggctgaggaagcagcctgtgtgctggcatgcagctccagccctcttgtctggaggagggccaacgctgggtgttctcttttccagcctgagaacttggctgtttcagatgaggagacccagtggccagtgcaggggacggatctctgcctgcagcagggcctaggatggagcctctatcaccctctattccaatgccctttcagcctttccagctcatcttctggctgcggcaccctgaagccaaacccttagacttccagtgggcctgcagtaagctccagactctgaaacagtgggtagatggcctgggtgggcagggaaaccccagctgagggtaatggggagttggcggaggctctgatggtcttaccagggctccagatttttcctacttggcaacctaaggaacatcacaggcatcccctgaaccatagttgctttataagtcacaaacgaacaatcaaaaccacctaacttagcctgtgaacttctgctcattcatatttaagttttcagaggctcagcctgaaggaagttggaagtgtgctgtcattagcaaggagagaaggtgtggcaggcacctctccgctctgaggccaaggtagcaccttccaaggatgctcaggagtgcatgaagcctgtcctgcctccagcaatacacagactcagaatatatgcagcagggcctgctgaggttgaggggagccagcaataagctcatggcaggtatcatctctgtgcatttaaaatttaaggtcagaacttgggaaccctttggtatttgccagccagaaggatctgcagctcagagggccatgaaacggtgaaacggcatggtggtgtgggcgggcaggctcctgtacttaccattgtggtcaacagagagggttctataacagcacgcagggcaagaatgagcatgatagcaccaataaggacatcagcatttcttgaatgtagtgaagtattcagcatgggccaaaagtactttatggggactatcttccttgcaagagacccagaacggagacactgtgattagtctccacctccaaccccagcctttttcctggagaaagggcaggggacaatcccagcaagactctttctcacccctgcccctatacgagtggagcagattccagattcaatagtggtgcatggagtgatcaatggataggatgccgccacctttgacctgaagactttagacctctctgcgtgggaggactgcccacccgacgggggcctgagagctttaacagagcagaaaatctcctctctgccgatcagctcatgggtgttggaaaggcctggcgaactgtaaagcagtgttgctggaggagtctgagcagatggttctattggcccagggtgtggccggggcctcacactgataggcatgccctccgtatgtccagcatgtgaccggatctgaaaggacacagactcctcagaaccagtgttctagccaggggggtcaacagccaacctttacatttttcctcttaaaggtttttttttttcttgttcataaaaatgccaaaatctcattttggggagataaaaagaaaatacagaaacagcaaaaggagaaaagttagtcctaataccacctctgaaagatgtctttggatatttgtagtttacagtcctatttctatgtattttcatgtagttgagatttcagggtctattaaaaattgtgttttctttcctacatatcatggtgtcatgagcaatcccgggttattacagcccttcgtaaacaattcctgagggctgaataagctagcaagccatgtctgtagctgagtgtgggcacgtcttagtgcccaccagactgtccccctcatgccagcaccttcctgctcagctggcctctgcactgcccatgtccacaggcacctggctgtgctcacaggatccagaggattagaaggagatctcctctagcgacagggtgggtaccatgtgctggagttaggaggcgaaagggtgacccctgtgtcttgcgtagatggacaaggcccccagtgtgatgtgatgagccctaacagagggtgccgtgacccagccttacctggcctgtcacggggcttccctgagccagcccagtgacctcaaagctttcctacctgtgacaccctccaagtggccaatccactttgagggtgtgaggtgagaagggacaactcacctagctgccaaccaatgtgtctaataatctccatgcctctgattcctcactgtcaattggagagactaatagcatgcaccccatggggttgagagcactaaaagcaatcaaacctgagtgtgtgcagagtctgcccccaacccccgaggcatgcaatagatgcgccccatcattgcttgcttctagggagctcccagggtggggagctggggctgacacaggaagtaacaagagtgacttggcgctggggagactgaggcctcaagagttcaggaacttcctgaaggtcatgtggcggtggcgatgagctccgaagcctgtgtctgtatgtgcttcatttgtgtgtcactccccatgggcacctttgtaactgttgtgtttttaattttctgtcagttggagcaagcagatgtggctctgggcaggatttcctatgctgtccttgtcacttcatactctgtcttctcccttgccactctggggatgtccttgagcagagcccatctctcattcgccttggtatcccaaggtctagcacagtgcctggcagacactgaggaagtgacaggcgtttgttgcgctttgagtcaaggacagagccagagcaaaggctactgggtgagctgaagggatatttcttctgagctctgatatctcggtgtccccagctctgttcttggcttgtcactataaatcagactggaatgctggggtttttcctggcagtctctccatcccctctcctgaatagtgctggatgagatagacaaattcttcattatcttttgcagccaaaccagttcttccctttccctgcaatattcccagccagccctgagtagcctcctgctacatcaatcccagtgcagcctgtctcatactggtgacattttacattggcatgtccctggtgagaatgttaagctcgttgaaatctgagaggcgcctccttgctctctcagccacgtagacactgtgtttccttaggccactgctctcctacgtgttgggtagacacatttccaatttggatgatggtcctttcaggctttggtctggcctgcggagaagggtatctcagctcagctgaactgagatctgccctcaccactaaggtgttaggcccgttctttatctagctataggaaaagtaaaaagagcttttgtagaagcaaagaggacctgatcgtgttaatctgtgttaatttcaagggtccagcccggcgattccaggctcccaaaagaaaaatgtgttttcccccaccttgatctactgctctgtgaggtagatgtactgaccgcatgtttagacactgagaatcaatttagcagccttctgatctctatatattctgtgcgtgcacaacaggaataatgatttttaacactgggtttggcaagggcgttgccagactttctcataggcgatctgatgggaaagctgtccccccgagggtccttcctgtagggagagttatatgagtctgagaaaacatctggccagcctcatctgtaaacatggcacaatattattgaatgacagcctggggaccagcctgtggggagtggaaatgcagtctcaggacagctataaactaatggtctttctttgcttactgacacattgaagcagggttctgagatggcattgagacaagggcccccatcacccaccctcactggcttcttggaccaagactgcatatactgatatgttcaactcactgtcttgtatgctctaaaacacttttgttttgaagcaagaaaatggaagacaagcttagggatggcagtttcctggaggcagcctgagggatgagaaataaaagacattggcacaaatctcaggaagcaagaattttagtccaggctctgggatttggggtgtgtcatatcatagctctgtgggtatgtttcctcacctataatatgaagaattggcttgctcgtttcactgatgctaggaggcatgttcatttcacatcttaatgtttcttaaatcaggctgcatcttactatcgctggcatagcacccttgctgttgccagatgacaggcaggacatagtcgtcatggcctgagcctgtgtgaacatgggcctactgttcatagtgtcacatcctccattaaaagaggtttgttgttgattagccatgtattgagtatgaatgtcgttaaaggtgtctacaaaagggtctcatcatgatttattagcagaagggccagaagacagagcagtggggcaccaatttaatattagagaagcaaatattgttggaggaaagactgcaatctcataaaacagtaagaattgtcagtctcatgcatgctaaacaatgccacgaaaggtggaagaaattgccagaagttgactcagaagagatgaaacagtctcagagccaggtgaggcctgcgtgagcaatttgtctacatgtaagactatcatgaaggcattatggcatagcttaattgacagcatattttctctgtggttcataaaataatggtgagccttacagttgatgactttgctttctaagatctcttctagttctaatgtctaatagttgtgttttcatttttctgtcaagtggagcaagcagatcaaaaataacgtttttggtgtttctctcctatgttggtgctgcttctctgggcccctgtagcacttgacccttgatgtcataactgtgtgatcgcttctctgcccttcgttttgtgtccgtaacattcaataccaagcttgagttagtgttttttaaatggacatatgggtggatggatgggtgggtgaacgaatggatgaatgggtggatgaatggatggatggatggatgaatggatggatggatggatggatggatggatggatggatggataagaatgggtggatggatgggtggatggctagacaggtgggtgggtgaatggacagttagatgagtggatggatggatggatgaatgggtagatgaatggatgggtggatgaatgaatgggtagatgaatagatgggtggatggatggatagatggatgtatggatggataagaatgggtggatggatggatggatggatggctagatgggtgggtgggtgaatggatggatgaatggatggctagatagtggatggatggatggatggatggatggttggatggatagatgggtgggtggataggtgggtggatggacagatggatgaatgggtgggtgggtagattgatggatggatgaatggatggatggatgcagggcaggtgggtggaccgatgggtgggtggatggatgggtagatggatggttggatggatacatgaatgggtggattgggatggacggctagataggtgggtagatggatggatggatggatggatggatatgtgaatgagtggattgatggatggatggctannnnnnnnnnnnnnnnnnnnnnnnnnnnnnnnnnnnnnnnnnnnnnnnnnnnnnnnnnnnnnnnnnnnnnnnnnnnnnnnnnnnnnnnnnnnnnnnnnnnnnnnnnnnnnnnnnnnnnnnnnnnnnnnnnnnnnnnnnnnnnnnnnnnnnnnnnnnnnnnnnnnnnnnnnnnnnnnnnnnnnnnnnnnnnnnnnnnnnnnnnnnnnnnnnnnnnnnnnnnnnnnnnnnnnnnnnnnnnnnnnnnatggatggatggatgaatggatgaatggtgggtaggtgggtggattgctgggtggatggatggatgaatagaatagatgggtggctggcttgctggctggctggagctgcaccatgagatgcatcctcatctttggtgaggcaacagatacccttccaggaagcttcaaacaagttctccagattcagtgggagcctagactcagtgaaatttttttttttttttttttgagatggagtctcactgttgcccaggctggagagcagaggcgcaatcttggctcactgcaacctccgcctcccagattcaagcaattctcctgcctcagcctctcgagtagctgggactacaggcacatgccgccatgcctggctaatttttgtattttagtagagatggggtttcaccatgttgcccatgagctgaactcctgagctcaggcaatctgcccacctcggcctcccaaagtgttgggattacaggtgtgaaccaccacaccccgctgactccgtgattttttttttaagggtttttttttttttttttttttttttttgagacgggtctcgctctgttccccagggctggagtgcagtggtgtgatcttggctcactgcaagctctgccttctggattcaggccattctcctgcctcagcctcccgattagctgggactacaggcgcctgccaccatgcctgcctaattttttgtatatttttagtagagacggggtttcacagtgttagccaggatggtctcgatctcctgaccttgtgatctgcccacctcggcctcccaaagtgctgggattacaggcgtgagcccctgcgcccggcgttttaaggcttgtcattgatgttcttttattcatttggtcctagatgattctaacaactatggtttttttggagaggcctccaagctactaagccagagattccaacccaagtcaataatcatggggccaatccatgtacattacttttttaacagctttattcagattcgatttatatattttataatttacacatttaaaatatacaattaaatggttttcagtctaattatagatatgtgtgacctttaccaccttcatcacctctaaaagaaaccctttagctatcacccccttgtctccctgcctccttcctgcctcagttgtaagcaaacaccattctactttttgtctctctagatgtgtctattctggacatttcatattaatgaaatcttatgtgatcttctgtgactggcttctttcatttagctttgtattttcaaggttcatccatgtggtagcgtggatcagtactttattccttctaatggctgagtaatattccattgcatgcatagttcatattttgttatccagtcatcagttgatggatgtttgtgtagattttaccttttggctattattaataatggtactaaaaacatttgtgtgcaagtttttatgtagacatgtgttttcatttttctcaggtatatacctggagtggaattgttgggtcataaggtttatgtttaatggttcaagaaattgcaaaccattccatatggttttccacagcagctgcaccatctgacattcccatgagcagtgtttgaggactccagttgctccacatcctctccaacacttgactcgatactttgtaaggtctttttacttctaagcttctaggattctgggtgaaatccagtgacagttgaggctatgggaggctcctttctggccttatatcccctccttctccatgtctcagtgtagtttgcagatggctgtgggggatttctcagttaattatctgccagttaaccactcagcctgctccctgcggttgtatctggctacagacttctcctgctgtgtgtgtgaagaggttatctgctgctaccatgctctagtgggtgaaattaaccacagaaataatgggaagtagagaccaaagactctgatggactaattagaacagccatcaggagctgccccctgtgggctctctgctgcaaggcatctggctgcacctgggagtccttcctcactgcagctgtcccagactagcctgtgggaggagctcttaggtcacagaggcccaccatgggcctctcggagggagcccacagtcctcccttccggcttctgttgattgcccacttcataccaggtcctggaaatacaatgatgggaaaaacgaaaaggtccctgttctcaagcacgcacactagagtgggttcctgatggaattaactggaacttagatttttctggctgcctgttttcccaattacttgatcatgttccagagagaagtaactggggaaaccaaccctaggaaaccatacctgaaccttctatgtggccttggccaagaggtcttgtctctggcttggcaatctgttgtgggaggcctctgtaatcgggctttatgttctacaaggtagtggatatggcttgcaaatatgtgtggcctgcagagcttggctttctcataccctctaaccagaagaagcctttgcagctcaaaaggactgcacctgtctcatccgtccctttcccccttcctcagagctcctaccctatctcagctcaacctgggggcaacgttcagtgactcattggttcatgccacaaggagtgggaatctgagatattgctagtccagggcaaatgctcaggattggagtcagatgcctgggtcatcatcctgccctgtcactgggccactggcatactgttccagggtccccatatgggagggtaacagggggtggtgatgcatgctctgcctaactgcagccgcagggttattaagagctgactggcaggaaggacaatgctgagctgtgcagactccaggggcatgaggcccagtgccaccctccagacctccctaaatgacttcggactccctggagagtacataacttctggcaccctggacaggacccaaaggcttgatctggagcagtttccaatgcccactccaggagggacgacagggtctagcagcttatgggggatgttgggcaagggctggcacattgagggagtggagctctgggaccctcactctctttggtcagagtatccatgtcttggagccattctgtccaggtttcagttctgagccagcctcttcctagccaggtgaccttgagcaacccttcgtgtcctcagtttcctaatttgtacaagggggacaaaaataatgcctacattataggatgatcttgaggattaaattaatatatgacaagcatttagcacaggggccggcacatactaaattctcaataaacacaggtatttattatcttttatatatttggggggagtcgtttataatttcatttgaaaaacaagtatgatattagaggaaaatagtttggaaaccaacaatctgtggggaatacaatattgatgatttgctttcctgctttaggaaaggtcaaagggcagctgcctttgagcaggagtttccctccctcgggtcctccaagcaaaggcagaggcagctgtgctgtgttgtctctgggcctggaggccactccaggaatcaggggccctgggcttttgctgccgatttctttgcctccctgtggttcgtagagaattcagggagagctgtaagagcgctgggcaccggatcaagtctgagattcctgtggttgctgtccagcatgcttcaggcattgtgtgggatacatgagggctccctggcagaagaggggcctgccctctgacacccaagctgtgtctgctgggtccacttgtaatgtgccacccatctgtgcccatcagcagccgtctgctaataccaaggtgggcagagcatttgttacctgctgctgaccattttctactttctgggaatccatcatgaaactgtcaaaaagaggaactgaatgtctatggtgaggtcagctcaggctcccagggtccaaggaaaggagcagacaggtcctcagcctccaggagctcatagtttagctggggaaggaggcagccactcagctcacattaaggctgagctggagggtggtgggggcattacaggagcagtgggacatccctgggctgtcctttcctcccttgagacactgagcaggagcaccctgtccctaggaggagcttgggtatgcacagccgagtttctgctgagtgacaccatcttctataatagctgtggctatcttcagccaggttatggttgagtactgctggtctggagcctttttttctttctgcttgcaatgaccttgcatatttctgttttggacctggactatcatgtattatttcacagtgtaactcccaagggcaatccttcgtcctgatttatttccaagttctgagggggagccctcatttttgtaggcatagaccacttccagttagttgctctttcgcaggggactttcgaactcggatgccttacaggggccaggcaggtaacatgtgtgagtgagggagccaggtgagagtgaggctgtgagcagcggggaggcattagagagtgtatgggtctgcagagaactggggttgattgcctggtctgaaggggacagcacttcttagctctagctgatggttacagcgcaagaaggtgggccagtgttgctcgatcatccagttttttcaagaaaagtcagaaattgtggctttttatgtgaaatattttgatttataaacgttagctcaaatatttttaaaatatctaactggctaaccagaacacaccatggtccagacgtggccccagcacaggcggtagcaatctctgctttgtgactgtgctccttgcaggacaaggcggtcatcgaaagtggtgggggggtgggggcaggcagaagcccaagggcccagtgagtggctgctatgagcattctgaggggtctctgtgacctgggccggtcagggtggcatctaagaggtgggcttgagctgttcttgaggatgagtagagagaaagggttgctgttctcgaacgtgagccagttctgccttgcaaccatagcacaagaccacctggacaggcctgcaaggccacagcctgctgagatctagcctgtgcacagcctgttctgggctgtggacactcccaccaggctctggaaacagctcggtactctctctgctccagctggtctgtagttcagggagctgttgccaagagggagaaagctgactggggaccctggaaaccccaagacagatgccagagagaacgttgcctgagaaggaaggcctggagcgctgctgccaccacacttggatgccctttctagccttaccccaggtgcttgtggacacattgctgggttcagagcagggcactattggtttcccttcctagcatgctccaagttaattttcattcttggccaataaacccagaagcttttgacagctggtggtggggctcacccatctaccttcagagtccacagaagagagaatggatctctgtgagttcctgcaggttggcaaaacaggtcaacccagggattggaatacaggagagagccagactgaggcccaaggaggactcagggtgttcagagttgggaggcattagggagtggtgagatctgcagagatctggggttcagagatagcagtcgtcattgatatccagagtagtcaaggagggcttcagggaggaggtgtgcccagaggtgggccttgagggaaaaggggagatttggagaggcagaggtaggagagaatgcagaagacagagtgaggtatagcagttgtgaagtcgagtgacaattgcaactgataattgagtgcttgatgtatgcctagcggtgttgagcacttttctcattcattctttcacatgattctcacagcacctcatgaggtggcactttcaccatcagcctactttaaacatgaggaagcaggcccagagtccgcccaacagcacgcagagaaaaggtgatttagccagcactggaacccagactcgggacccataagcatgatgtcaccctattttacgagtgggggcagtgaggaagccacctgactccagccagggatatggctgtccagctgtctggtggccctgcacagttttggtttgtttcagctatgacttccctgtccctggtgcctctagggtgtatacagcagatgctcagtatgtcttagttgggaagagttgtctcgaggaggctcttgaatgtcatgggaagaggtttggagtcctggttctgggactgggtgaccttgagggtgtggggggctggagcaagtcaactcccagcatccattggctttaacattctaggagctgggagtggggctggaggaaagcccgggcccattggcagtgggcggaagagctgaggaggcccactctgagggaaggacggtgctggagagggcgtgggcgggctgggggagccacaggcccgtctacccattctgggcctgcaatggaagcaggtgtaggatggagcagggccctcaaggattacgcagtcttatcaataccaggcaaaaacctataaaaaaaattcaagagcagggcaagagttgggtagcagcccagaggcggaggagaaggtgtcaccaggcagcctgggtttggtgccaagggagcaggtgggtggtcagtgctggagcccagtggaggcttctatgggctttgggggcagacctggaaacaggggcacccagggataaagcaggacctgcacgtcacagagcccacctggatgcccacctggatgcccacctggatgcccacctggatgcccacctggatgcccccctcccgcctattgggctaggcctacctgcccgggtgggttgctgtttcagtgttcttcctccgagaggaagtgctcatcaggagccaggaatctaatgaggcaccccccggggactgaggcctgtaccttccacactcctgcgggctgctctcccttcctccctctccagggcctccgatctcagcccccattctgggtgccagcactgcaggcctgctgagcaggaaagaatccatggcatctcccttgccttccggccagccatgccctgcccacctcatgaaaactggtccagctcctcagtgactcatggaggctactcttggggacagaggagtaagtgccaagccccagctctgtttccatgaagttctgatgagaccacagggcttggtccagggctttgcacagggtgggggctcaggagggtatgaggacaatgggatgattttggtgtcatctgttatttaggagtatctgtcatgtcactaactgcctgatgttgatgattgtaacccagaactgcgcttggggtccacagagcttaggagtcactaagggaaggaaggtgactctcagcaggggtccctggagaaggcaggctgttgagggatgtaaaggcttggatcctgcattgcagcctggctctacccatagatacctgagtggctcccagtacgtcattcccccttcagcccccaaggtcccagtgtcctcacctgcgtggcagcagctgaagagctgttgagggcaggcagcatagatatcaggaactacctccaacttgttcagacctggcagatgtgcctgagctccatgctgggtgttgcaggactgtaagcaggtgctgtcatgtcatgcgcctggccctgagagtccagtgtggaggtggtggccccagtgtccactgatcataataacctgtggaggtcatgcctggttctgagctccgccctgggccctgcgtgggccataagaggagccgccccttcaccagatagctgaccagctggccagaagtttggcctggggactccacccatttctagccctctggccagagcaagagtatctgaataatggataaagaagacgtgcaagattttctagatcttgtctatttcaagtgtagttctctgactggcagcagcagcctcacctgggagcgtgttaggaatgctgagtctcaggccccaactcccatccttgaaccagaatctgcattgtaacaagatgccctgtgattgtcgtactcattaaagtttcggaagcagtgctcccggccaatatgtttttcatgggtaggtgaaacaaaagtcccacaaattgatagttacaatgtgtgctacatgctgatattttcaatttagttatacattttttaatgctgagatcgtgacccaggaaatttgttttgcagctcatgaaattgctgagacctgcagtttgaacaccaccatgctagctaacaccctgttggatgtttgagtgacaaaagggttaatttggtggggtgacaggggatcagacgtttagaggacgtcagatgtccttgactcctgtgacagaaaatgttgccaatttccaaggtcacatgccttcgacttcatgcatttctgaactttcccatttcccaggggttggggacctggggctcctgcacatggaggcctctgcttcctcctgcttttctttggcaaacaccaacatggttgaattatcaggccagagcttgagggccgcagactgtcggggaagtacattctcgctggagtcttgaaggggagtgtgggctggactggggctggagggacgcggttggcagtgagcaggctcccatggcttcctcggggagagcctgggcaccctggcctctctcctccccactccagcaggcagcatggcctctggactggccctgccctgggggccacctgacagcctgcaagggagaattctagccccaattgtgcattctgggtgaaggtgttgctcccactctgtggggatgggaaggagagaggggatggaggggaccagggcccgaaagccagcagccagctctgcctataatagtcaccaggagctgcttgctggagagcaacctgggagcacagtgctttgcagcaccaggtgacatgggaagcggccacaggaaggtggggtgaagacgccagtggctgtgatgagtggatttagcagcaggagagcagggacaacactctgggccccattgcccaccacagctccgatgccacctccactgcagacttgctgttctgctgggacgagtggacagacctgtgagccccaaggctgctgatcttacggtcaccaagcaagccccctgcagccccacctgggccccctgcagcgggcctgggttccacaggaggctggaccccttgctgcagccacaagccaaaagatgagccaggaagcagaaattggggtcttcctgggtttcctcagtggggtgtcagaagggtgtgctgctggagtgagttgggtgctgggggtggagaggaaagagcctgaagaagtgtggggtgcagtgctgcctctgtgcgggcctcgaatgatggattccctgagaagtgctggtaggccctggagcagatgcatttcatctggtttgcaggtcactgaactcatccctgaggattggaggaggaggtaatgcccctaatgcctcgcagttcttaaaaggattggctaaattgatagctcctcatgccatttgtcactgggtgggcaggaaaggatactgagaaggctgggatggctccactgattgtctctagcctgtgggtgctctccaatgtcagccttaccttttcctccagacctcctgcctctgaaggtcagactcaaagtcagacttggccaggggttagagggagagactggcaaccgaccatctcaggctgccccacggtgttcacagaaaccccttccagaacactagtttcctaaggaagctacagagtgctgggctgagagcagcaagggatggggaggaaggggaggaaggcgaaggggagtttgtttgcgtctagggtggggaggggacgctagtgtggagagaggcacctttttgtcaaagaacatgggtgattttcatttttgtccttaaaaatagccaggctaactgggccgttgtgacaagcacggactgtgattggctgcagcaggaggtggggagtccctgggctggcggccgagtctggatgaggttgtttaacagagatgcagacccaggaagagagcctgcatgcatccctttccccagacagacacagatgtggccaagcttggcggccctgggtcctctctgggaagcacaggcgaaggagctctggggcaggtcctgctgcagcccgggccctctgtgtcctccagaaagccgtgcccacaccggccctcccctccagctgtagactcagggctgcccgcccctgtggtgccctttacagcaaagtgcaacctcagcatttttcctactcctgctgcttgccttttagttcctcctcatccatcacctggcagggaatcggagcagagccgggagaggaggggagaggcgtgtcttttgtgttcttctaccttccctcttttccttttccttctgcctctggttccatcctttcttgactttcactgatcattaaaacataaattcctggctggctctctcagcttagccagcagcccagctgtttggggacttcccatcaggatcctactgggaatgagacactgagccaggctgaaacccccaaagctcaggcaggaaggcagcaaaacaagcctggaggagaccatcccttgccctgtgtctccaccagccagagaaagctctacccttttcctccacactcgtcttgccttaaaaatgtgttggaacttttctaggtggataccccaaagaataaacagggactcagagggatcgttgtacactcatattcaaagcagcattattcacaacagcaaaaggtgcaaacaacccaaatgcccatcagtggatgaatggataaataaaatatggtctagatatgcagtgtactattgtgatacgatgtcttattcagccataaaggggcatgaaattctgatacatgttacaatgtagataaaccttgaaagcattatgctaagtgaaataaatcggttgtaaaaggacaaatattgcatgattcctcttataggaggtacctggaataggcaaattcatagagagaagggtgaggaagagttcattgtttagtgggcacagagtttctgtttgggttgataaaaaagttctggaaatagatagtgatgatggctcaaaacactatgaatgtacttaaagccactgaattatgtgttcaaaaatggttaagattataaggttttgatttgtttgttttgtttggtttggttggttggttgttttttttgttgttgttgttttgttttgttttgtttttgctttcagacagaaactcactctgtcacccagactggagtgcagcaacacgatcatagctcactgtaacctcaaactcctgggctcaagcaatcctcctgcctcagcctcctgagtagctgagcatgtgcgaccatgctcagctaatttttaaaaaaatttttggaaagacgaggtcttgctatgttgcctaggctggtatcaaattcctggcttcaagtgatcctcctgcctcagcctcccaaagggctgggattacaggcatgagccactgcacccagctgaatgctgttttatgttgtgtatatttgaccataataaaaaattgggggcctaagtgccgggctgtacttccaggctgagagctgtggaggtggacgggcagaggagggccatgctctctccctctctctgctccttcttctcttgtgactgagatgaagcttggggcttttctgctttgcatgttccccgcttttctgaagctggggcctccccactccctctctgggccccgctgcggaacagggaagtgatgtattctcctgttccccctggaaaacgagagttcctggaggagctgaaatccctgggagagagtgaaaaggaggggaggaccgacaagtgaggggggctagggatctggcggccactgtgggccacggggctcaccccactcggagttgctgagggaccacgtggagcatgcctggaattgtctgagacactgaaaaggggagtatttgtcccattgagggcagccgcatggggcgctagctcctcatactccgggttgcaggtgccaggggccgggggcttcctgcaggcatctcctgactgcagaggaagcctggacaggagaccccggggcagctgaggtgaggcgccgctgggctaccccatgtgaatctggctgggcagcaaacactagagtagaaggaatggccgagaggacgtgaggacacaagaggcacccgcagagcgagtcctcttccttcctcggggcaccaaaaggctgcaggtttgggatgggtctcaattctgtcccctttctcagcaactattatgggtttggggtgatgaccatgcccaggctccctcatgggaccctgacacagccctgagacactcgggcatgtttgggagagccccgcagagccggccagaggctgctgctgcaggcagagcctggcactcaatcctcctggaaacggctccgtgtagagttcctgcaaaacccggttctccgactgcacctgttaggtgtgccagggagcccttgataagatctgacgtcttccaggaataatgggcgtggccttgtgtattgacttctcctgcaggtggctccttttcagccctctctggacatcggcggttttattcccatccagcggaggccagcttcccggggccaggcacggagcctgcttggggccagctctccggaacctgtgcccagctggggaataagcacatgctcagcacttgaagaattcactgctcactggcgagtcagtatggaattggggaacttggaggtggcctgagggactgagcaggccaccaggagtggggatggagagaaggcagttggggtataggcatagtcgtgcagacctggaactctcctgtgtgaacttgggcaagttacttaatctctctgaacctccgttttctcttctaagtagcataattatgccgattccatagggttgctgcgaaggtgaagtgagtggaggcagatcaagtgctgacgtgtctgggacatgacaaaggcacagcagacactcgtcattcctactattagcagaaattgcagcattcatacccatagccaaccctgggtgaatcttttgcttagtagcctgccatgaaaccaaggcaatgctctggccttctgtgcatataaggacctctagatttggcaggtggagggaaggagaaaatgcttccaggtgacaggttcagtgtgagcaaaagcacagaggcaggaaagagcgtcctgtgttcattttctattgcttcctaaaagtttactacaaacagcagcataaaacaatagcattcattatctcacagttctgtaagtcagaagtctggcacagcgtctcatgagactgaagtcaagttgttagccaagttgaattcttggctggaggctctgggggaaaagtctgcttccaggctcattggttctcagatgaatttacttcattgcagatgtaggatgaggtgcccacttccttgccagttgttgaccagggattgctctcaactactagaggctgcccacatgccttaccatgtgtctcttttccttcaagccagcaacagtgcattgagtctttctcatgctttggatctctggcttcttctgctgtgctgagctctagtcccagatttaatgggctcaagtgcttgggtcaggccctcctgaatagtctctctatcttaaagtcgactaatttgggatttaattttgtctgcaaaatcccttcccaagggtatctagactcctggagagtaactgggagagggtgtatacccatgactgtcttagaattctgtctgccacacctagcatgtgcccaggatgaggagcagagtagccaggggctgaagcaggggatgacttaggtgtgggcagctgtggagcaggaggagtaaggtgggtgctggtggtgtggggaggtataaggtcctgtaggctttgagtggcaggtgcaggaagaggcaatggacagtacctcccatgcccctgcctgtggcccttgccaccagatgtgcatagcccaatcccagctgactccctgaggacctgctgccacccttgcctccacatctggttccctcattctgaaaagggcaccgccttggcctgaaacctccagtccgctgattcctccctctaggatgggtgaacagacccacagctccaaggttgctgagctcaggggcccagagcgaggccctgcagcacctcagagctccctgcagcaggcctggggtccgagggaggctgggccccttgcagcggccaaaagcctaaaaatgagctgggaaagcagaggaagatgtgtgcacagcagggcggttctccttcccccgggcagttcttcctctccattccctcaccctcggagaaggcagtgagggtgtgggagagtcaacattcatgctctcagcagcatttctggaacccagcacaccattccttgccctgctttggactcgctgcagtgaaaacactcaacaaaccctagattattggcaaataactgtgttccaaagaagttctcagggttaaggttctgaggttcaaagttttgaaattcaaatgctccattaaacctgctaggacctcgcctttattactggcagcagcattcacgctgctctatatggcttcagagccctgtgtgtgcaggattcatgtcttctctgtgctttcttgtggtagtggtttggtagaagtctgttctactagttgtgatactaaaagcatgtgcagactctgttttctctggcagatcaggatcttccatggaaatcacaggtctccagataataaaagaggcacaaggcaagctttaaatccccttcccatctagcctggagcccatcagaggaaggggagggtccctggcctggaggtgagaaaggttctagctttcctcactcccaggtgggtcaggtgggagcttcgggggataagcaagggagcggggagcagagagggcggtggcggtgaggtcccagcagacctgggcccctgcagggctgggttgagcacatcagctccagagattgcagttctgttggtggactttaactagtgttccagccatagctggtcatctatgccgcgctgccccagagagagggcgcgagggctaatgggttagtcatgcccctgtaaaggtgaccaggcagtgtctgtggctaggccatatcagcatagacaatgcagcaagcctttctcgttctgccagtgaaatccagtcacgttcctgcagactcaccataggtgtgttccagtagctgcaccagagcaaggctgcaaaatcctgcttataagttacggcccataggcttcaactaatttaggggacagtctggtgactgaaaagaaaaagtctcctcttaagtagtcattttcttggaggacctgagcccctcagaggtttgtgtctcgggccccattgtgcaccctcaatcttggttctgttgtttatttcatcctgctttgtggtagattctgttaaatctgagtcaggaagtgaggcttggcctgtaggctgagctcatcttctgcctttcccagcgattaaggcctaggtagacactaactctgacactgcacagtgcctgtgctggccaatcagacaagtggcctgcattccctgggcctcagtctcctgccctacacagtgggaattacagcacatagtttatgctgagggcaagccagcccctcgctgacttctcagggttgttggaagaacagaacgccatgatggataagaagatgcttccaggagcagagggtgtttctcaggtgtgggcatcgtcgtctcctccagcagcgtctcacggagttctctgtcctctttcccaccagtcccggcccaggcccctgagctggagggatggaaaactcctctgcagcatcagcctcctcggaggcagggagcagccgctcccaggagatcgaggagctggagcgcttcatcgacagctacgtgctggagtaccaggtgcaggggctgctggctgacaagacggagggtgatggcgagagcgagaggacccagtcccacatctcccaggtgagcgcgggcccggggttggggcagcttgggaaattcagagggggtgatgcaggagcccctaattctgggcagcatccagttgcctgacactagaccgccaaggcatgaatggtcccacccagcagagcacccagaatctggcaggtgggctttgggatccaggcaggaagtgccctggctgtgcaccccgtccctctaacccacctccactcctccctatccaatgaggctttgaggcccagccaggcccacatgtctttgaacatacgtctcttgagtactgactatgtgctgaacgctgttccctgtcctcaataagcttatgttctaggagagatctggaggtttcgcttctccataatgcataccatcaaagaactataacttgtgaatattttctgtgatttcaaatacaagtagttgttggtagccaaaggaatgattgttagtagccaaagtctcgtgggattctcacccagggctctgtatgtcagacatacttagacatatgaggcaatccaaccagcgtcatgtttggtcctgcaccctcctgcctcagtctgtggcatccctgaccttggaggggagatggactcatctgaaagattgtgagctgagatttgaaagtcttggcttctccctcataaagtatgaatgcattaaggatagggaccctatcaagcatatctttgcctaacaccacaaatcctcagcagatttttgttcaagagctgcttccagattggcttctagctgccagtgtgaccttgggcagaaccttcaatgtctgtggggctgtgttttcttatctggcaaatgggaattatgctgttgcctcgggaatgttggaaggtcaaagacagtaagaagtacaaaagctgcagagaatcagtgctgcctgcacaagcatgtacaggagagtcccctgtcttatctggagtcagggttctggggatccgcctctcgtgcgtgttatcccatctccaagcctgggactcctgggacaatcagaaggtgagctacctgggtgcaccctgctttgggaaaaggctgagtccaaccacctggctcactttttgggtgggacccctagctttttagaagccagaacaaacttttggctttgctggaactcagaccaggagtcactctgggaaatgctgaagccacagtaatcccatgccctgtccccactgggaagcaggggacagaaaatagtcctgagggagaaaaaaaaaaatagatgtgatgctttctttagtgtccttgaggttctaaaatcacaagtaatgcaagcttataatttgtttgttattcaatccatgagtgtttaacaagcttctattctgtgccaggcactattctaggactcgtatctaggattgagcaaaaaagccctgccctcatggactgtgtattctactcgtggatgatcattgcgatggagaaaagtaaagcggcaaatggaacggggagtgaggaggagcaggaggggcttgcagttttaagtagcgtagtcagggaagctggcatggaggggagggaggggtgggtagtggagatatccggataggaacatctgggcagaaggaccagcctgtgccagggctgggctggaagaagagtccgggcccagccaggaggccagggtgctggagcagaggatgagggagggagagctgcggagatgagtcagagggatgatgaggactgtgtcgtcaggaggtgcgagtcctgagccctggagtggccccacatgaggaagaaagaatgtgaggagaagtgagcctagagaccagtgaggcaggagggaaccaggctgctcctggagcccaggaggggagtcgagggagtgggatggggagactgccttgcgggccactgccaggccaggtaagaggggctgagaatggctgactgagcagggggccgtgacggggaagtttccactgagcggtgaaggcagaagcctgcctgtggccagctcaaggaacagaaggagatggcctggagactaggagaatagtacaactgttttgaggagtttagctgtaaaggggagagacatgtggtggtatttgggggaaataaggtcaaaataggagcattgacctgtgtgttcaatccaggggcaagtcaggggttgctggagccctggcctatccccagcccccagcggttcatccacaatgacaggagggagtggcaggtgtggggccgcgcatctaaaatggctcctgcagcacagctgtggtttctctccagctgcttgcggccacgaaggtgcagaggcagagttacaaagatgactttaaccagggtggaggtttctccagggaatacagtggaggagagaggggtgagggaggcacaggagtgatgatggtgagtcacctggatgctgagccaggccaggacgggagtgggtacctgaggtggttgtggaggctgacaggtggtagggtcagtggattggaggccacccaaagaattgtaatcctggtagcaaagagactgagctagaaagatggtgggggtgtggcgtgtgtccaggagtggggtgtttgaaatcagaggtggaggaatgcagtcatgggtcaggagagggctgggtgtgagcatgggagtgtgtgggggagagggagaggccaggaggagagcgggtcgtgaaactcagatccatcttcatggatcttgaaatcaccaagaaaggacaaaaggatgtgggaaagggtggctgtgatacaggagaaaagtccttgaggaatgtgggagcaaggtggtggctgggtggcctggcggtctacagctgaccgcatggagggtcttgtctggtggtgcattaacttatttgcataatcctttttttaatatacaaactatgcttattgcacagctaatagtaccatgatctgaagtggaaggaggaggaggattaggatagattggaaaattgtaagggaaattaacctctttagattgtctagggcaggaactaagtgaaccaacttttgcagtcccctggaagcccctagagctgacttccccaggagcagggcctgtggatgggcatatgggctggctgggtaccccctgttgtgggctgcctgccttttcagctgtgtggcatccaggcctgcagcagggcatcctccaaaggttcctccagctgaaatttgctctacctggaggagccaaggaagcctcaaagcttcaccccagaggtatgcgtggctgatggtagaatttctgtgcccagagcagccagcggggacatagttttgaaaggaggtgccctcccagcgctttcagtctgggctctgtgcttctggcaccagctccagggatcagtggggcctgactcacgcttggatgcccccatctgtgtggcgggcaaggcaaggctgtggaggggctttcagactgacgtctgctgtgaagtgtggtgtggagaacacctgtgtggtgtgacatttggatgcattctctaaactttcttcatgctctggaattccctcgaagaatgcagacacctggcaggatgctggggcctgcaggcctgcctgctgctgccggaaagggaggatgtttcaatcctgcccctaccgcgcccctgcctccctgatccccacagtcacacacacacctggggtaccgactctggaagagggacggctgtggcccactctcaggaaggccagggttagctgtgtctacataagatactttttaaaaaaattctctattaacacagctttatgggaaatatttctgctaaagcactttggcttgtttttttttttaatctgatgactagtttaaatggaagccaaaaagaaaaaaaaaaacagcaaacactcagggaatgttcctgtctgcctgtgtggtattttgatgtttctggggaggaaatttgttaagaagcttggaaaccttgagaagacctgagggagtggagaggaatgttgctcttcagctggtgaggtcattttttaggatctgagaagtgacagttgacactcagggagaaaatatctcatgatgtttgtacacttgtgttcctctcgtccttcccagtaacaactagaaagaaatgaaggatggatggatggatggatggatggatggctggctggctggatggatggatagacagacagatagataatacatagataatagatagataagatagatagatagatcagttttcctgtctcttagatgaataaccaagacaatgtgtgttttaagtttgccaacattttctggatgccatgtttaacatcatacctctccccatgcttgacaccacgcccctccccatgtttgacaccacgcccctccccatgcttgacaccacacccctccccatgcttgacaccacgcccctccccatgcttgacaccacgcccctcccccgtattttacatcgtacccctcccccatgtttcaggagcacctgctgtccaatagattggaagtccccacagtcactctatccttgggaggaggagggattttagccctattctaaaggagggaaactgaggcacagaaatggagcatggccaaaccccactgctgggtggtggctgagctgggctctggagccccatccccaccccacctacttctggtttcctgctccgtacaggccatgactgattgggtgttgggtggttaatatagatttctttcctatagaaagaaaattaggtctccaaatctcattgaccactaatcttttggggaagagattaggatgttgtaagtggggaaaattttggcacatgtgatgttcgtggatgatctagtggatcaccagaaagcttggaagcagtatgcaactctgagcgagcatgaactcacttagggagctgtgagaaatactgatgtacaggccccactgctagagatgcaggcaaaggtgaggggcctgggcctgaactattcataagcctgtgcatgactctgattgccacagtgggagcagggctgtctcctttctccccctccatggcctgctgccccgatccagtctcttggaaagataacatgtaggaaccctatgaagatacatttaatgacagcatagtttccagtaaattcttgttaaggggtcaaattaagagccagtgagagtgaagatcacttcctatagccctattttgatgctttccggcacttggaaaccctgggtttcatctaaaatgcagtgatctttacaaaggggtgcagcagtggcaatgaataggatagggtgagagtgttcagatcggctcaatggcttttcctaacaagtttctcctctttctctttacgtttctcctttcattctgccttccctgttcactgttccctcgccctttttctaaaatcccatctcttcatttccttctgcccttaaattcatttttcctgatgtctttgctcacaggaggaagtactcaatggtggaccacccatgaaaggcttaacagaagaagtgagtttataggaggactgcggggtggttcagcatgggggatttattatatattttccccttatttaaaaaatgtattctaaattatacaagtactttatgcatacattcccatagtgcacaagaattcagatattaataattaaattctcctgagctaaaattattttaaattatacaagtcctttatgcatacattatcatggtacataagaattcaaatattaacaataaaatcttctgtgctaccacctcattctgctcccttactcctacctcccatcagatgagtgagttcatttccttgccttttttaatgcctttcctgacataggtatgacttgaagaaatacaatattgtcaaatcatatatcatagccagtggatatattgttcaataacttgcatttttcacctgcccacatgccccagagattcttctgggcttgcacatctgctgtgttccgtttagtggctgcccagttgtccatagcatggatttatttaaccatttgcttaatggtaggcactcaggttacttctaaattttcccctggaaatacgtgatacttcaacacatactgttgaacatgcctccttctgcacaaataatggagtttctttagttagatgctgagaagtaaaattaattttaatagctgttgttaaagtgctctccaaagatcttccattatccatactgccaccagtgtattgggacatcttgtcattttaattcacattgtcttatttctttttctttcttttttttttttttttttttgagatggagtctcactctgtcaccaaggctgtagtgtagtggcgcgatctcagctcactgcaacctccccccaccgcaggttcaagcaactctcctgtcagcctcccgagtagctgggactacaggcacatgtcaccacacctggctaattttcgtatttttagtaaagatggggtttcaccatattgatcaggttggtcttgaactcctgacccaggtgatccacctgcctcgggctcctaaagtgctgggattacaggcgtgagccaccgcgcccggccacattgtctttatttctaatgaaattgaattaccaatctttttattttctttttttctttttttttgagatgagtcttgcactatcgcccgggctagattgccatggcatgctctcggctcactgcaacctctgcctcccaggttcaagtgattctcctgcctcagcctcccaaatagctgggattacaggcgtgtgctaccacgcctggctaattttttgtatttttagtagagacggagtttcactatgttggccaggctggtgtcgaatgcctgacttgtgatcccctcccatggcctcccaaagtgctgggattacagtcatgagccaccgcacctggccgttttttttttgtttttttttttttttttgagacaaagttttgctcttgttgccgaggctggagtgcaatggtgtgatcttgactcactgcaacctctgcctcccgggttcaagcgattctcctgcctcagcctcccgagtagctgtgattacaggtgcctgccaccatgcctggctaattttttgtatttttagtaaagacagggtttcaccattttggccagacttgtcttgaactcctgacctcaggtgatccaccctgctcggcctcccaaagtgttgggattacaggcgtgagccactgtgcctggccaccaattactttttaataggataaaattttattttctcaaagtaacaattggaaaaacagaggcaagtgaaaaatggaaaaaaatcattttatggcaactaatataatttttgtgcatcattttttaaacatcttttacaaagttgtacttctagcatacatgtaagttttatgatctgtaggttttaatgatctcctagacattgtttggtggtggtttttagcataaagtgtaactatttaaatttgctctttttctgctaggtggtaaaatataatagaatgaaagctaacatttattcattcaggctcttttgtaggctcagggggcaaagtcaagaacaaaacaaccatgatctctgtctcagtttctcacagggaaagacagacaatagagggagaaggaaatgggatgttagaaggtgatgaatgcatgagggaggcaggaagtgagtggggaaggctcgcttaggagtgaggatttgggcaaggtgactcacgcctgtaatcccagcactttagaaatctgagacaggtggatcacttgagcccaggagttcgaggccagcctgggcaacatggtgaaactcagtctctactataaatacaaaaattagctgggcatgatggtgcatgcctgtgatcccagctactggggaggctgaggtgggaggatcacctgagcccaggacccagaggttgcagtgagctgagatcacaccccttcactccagcctgggcaagagagtgagaccctgtctcaaaacaaacaaacaaaaaacagaaagaaagaaaaagaaagaagacagggttgggggggagggtggggaggaaggaagggagggagggagggagtgaggatttgaaggaggtgagagtgaggccacctgggaaagggtatccaggcagagggagtggccagggcaaaactctggtgtggggcataccacacagtcaaacgggatccctctgaatgctatgtagagaataggctatggtagggggtcagcaagagaggaagcagagaccaggaagccgtctccttgctgcaggggagaggcaatggagactggggccgtgtggtcactggaggtgatgagatgccttcagagtctaggtatgcttggaaagtgctgacactgtgattgaccctgaagattttagcctgagcaaataggatagactttgcagaaatgagctatgcaagaccctggaagagcagctctggggggcaaaggtcaagagtcccgtttgggcatgaaaggtttaagatagtattagtcaccttagaggagatgttggtccaccagttcgatgcacattggtggtgttcagaggaggataatgagctgggtgctgctttaagcccagggggtgaggaagtttacaggagaggatcaaagattgagccttgacttaagaagttggggagatgaggaggaagtaacaaaggagactgtttgcattgtttctcacatgttaactcatttagtcttgaagatgttgttattattaccatcttacaagggaggaaactgaagcacagagaggttgacttaagcttcctgaggccacacagcaagtacatggcaagactggggtttgaaacaggcagcctgtctccacgtaccatccacttatcctctctgctattggtagacctattattattacagatgggggaaacttcgtcctggggatgaagcgatttgcccaaggtcatagagtaagtggcggagctgagatctgaattcaggactctctgcttcaagaactcaagctcctaatcacgcaagcattctctacaacaggaaagttgtttgttccttaaaagatgggagcaaaagcctccctctctctctctcaaatctcagccatcagcagcatcctgtccctcttagcacaggtcttttctaaaatatcactggatagagaatgagctgccagccagccttgggtcccacatcagggtcttggttctcctccccatgtcagtaagcccatgtgcccaggagaaaggaagatgtcatgcacactcctgtctttgagaagttgggtcttcaggctggcaggattctgactggggtctgtgagactgggaggaagccatttcccttcagcctcaagtctcccttcagggaaatgaaggcattggtgagagccctggttgcattgtgcagcccccacctggcacaggttttacacacagaggtcacattccaccaccacctatgcattcagacactggggaagacctggcctgtggacccccaaaatcccccctgggtgtctgacgccaccctcggttaagaagccctgggtaagatgacctttaaaataactatgcattttgaaataatttcaaatatacatagaaattacaataatagtgcaaacaattcttgcatatccgattaacatcttactacatttgtacccacactctctctctaaatatatcttatgatatatataatttatacatataattgtatgtaaaacttctttctaaatcatttgagagttagttccagacatgatgcccctgtatcccttgacactccagtgtgtatttcctcagaacaaggacatgatacagtataggaaatgaacattgatagaatgctgtgattaaacctacagctctttcagcaattttcccagtaatattgtttagagcaaaaaaaaaaaaaaattggctgtgatctttgtctaatccaagatgacatattgtgtttaatatcagtcatttttcctgggtctttgaatgatccctatttctgtcctttgctcatgctgccactttttggctgtgtattcctgggtgagttacttaaccacactgtgcttcagtctccatgtttgctaattagagaaggtaagagtgcctcagcagccatgaagagtaaatgttagtaagtgcaatggacttagaacagtgcctagatttaagagaagtctttatatagtctggtgattaattctttgctacacagcaggctccccttatccactgttttgctttccatggttttagttacccacggtcaactacagtccaaaaatgtcaaatgaaaaattccagaaataaacaatttatacattttaaattgtatggcattccaagcagtatgatgaaatctcatgctgtctctcccgggacatgaatcatccctttgtccagcgtttctaggctgtatcctctacctgcgcgtcactgcccagcccagagtcactgagcagacatctctgttacaggatcacaaacagatgtagggctttttaccacccacggtttcaggcatccactagggaatcttggaatggatccctcagggttgggggggtgggcgactgtgcatgttgcaagtagcttctcacttgtctttatttgttcatgatttcttttgtcgcttagaagtttgaaattttgatgtagtttaaaatttgcatctcagatttcaatcaccttggaatgtgttttccaagaatagtgcaaggcagatatctaaggtcaatttttcaatggctgggtggttgtctcaataccatgtatttattgatgagtctctccctcaattcaaaacacaatccttacctatatgaggttcccatttgtacattaatttgcttgtgggtgcagttttatcagttgatctgctcttttattcctgtactggttcaacagcttttttgtctctagctttttttttttttttaattaatttatttattttgagttggagtctcgctctgttgcccaggctggagtgcggtggcgcgatctctgcttactgcaagctctgcctcccgagttcatgccattctcctgcctcagcctcccaagtagctgggactacaggtgcctgcaaccacgcctggctaatttttttgtattttttagtagagacggggtttcaccgtgttagccaggatggtcttgatctcctgaactcgtgatccaccctcctcagcctcccaaagtgctgggattacaggcatgagccaccgcacccagcccgggctctagctttatgagatactttgatatctggtagggctggtctcttggaggagttttaggcaccactgaaatgggggcctggtctagctttagcacctccagcctcccacactctgagcttcttgcttctctctcctcctcctccaatgctcagtaccctggggtctccccaatctttcccaatctctgctcataaaacactggccgggtgtggtggctcccacctgtaatcctagcacttgggaggccaaggcaggtggatcacctgagctcaggagtttgagaccatccagggcaacatggtgaaaccctgtctctactaaaaatacaaaaaaattaaccgggtgtggtggagaacgcctgtagtcccagctacttgggaggctgaggcaggagaattgcttgagccccagaggggaaggttgcagtgagccaagattgtgccactgcactccagcttgggccagagtgagactccgtctcaaaaacaagacaaacaaacaataaaacactcttcatcctgggatgtaaagacaaatagcttattttcattgttttttattgtgaaatacttaagatggactgataacagagaataataaaatgcacatctattttgagtggagaacaaacacctgtactctcatgtttattaagtcttaaccctgtgtcatgtttgttccaggtttttaaattaagacacgaattttaatagctgtggttgaggcctttaaaccactcttgtgaatttgatgctcatcgttcccatatctaacaaacttcccacgtttcccgcctttctgtttgatgaccttttcaagtaagacaccacctttacccccaagagaacttaaaggttcaggaggctcaaagctgtaagcctgtttgccttgaaagggaaatgtgtgggatttcaagccctggcccggactgaggagcgggtctggagaggtggacccttcttcattcttgactcatctcctatatatcaggacaggttctggggaggtccatttctggagattttctaggcggtgtctcagagaaggcaaacgggaggcaggaggtggtggtgcctgtgccacaagaagctggtgttgagagcagaatcccagcagggatggggaggaacttcggaatagggaagggagggctaccagagggcctttagggccagggaagaagcgtgtctctgatggaggggattcaggcagtagccctggacaggttgcctctggggctactgctgggctggggtttgagatggagccccacaagcccagtgggtagagcttgctgtgctaagtgtgatcattcacacttcactcctccccatttacacagtcacacgcagggccacagtccctcctcctgctgggggttgtgcccgcctccggctttgttgggtctctggaatgaggctctgtggactccaccatcttgctggctttcttgtgcacagatcacccgctttgcctgctgctcatctgttccacactctgagatccactgcttcatttccatctctaccaccactgctaatgaaccccaatgtgggaccctccttccccacttcccccctgggccagttcagcctcccctaacagaagccttcaacccctgcatatggaggaagtgtctctgagttctttagcctgacagccgccatctgccctaagctggccacgttctactgagcctgttgcccctcttgggcacctcactcttctctgggaaccctgggttgcctgcttttcctcccttacagcccctgccgagagcacactcttcttcatctcagccgtgccgtccccacccccctctcattgctgttatttgacatgtcatctgacctctcctgtgtggggacactctttgttgagggccccacacagaaggcactcaggaagtgacttttggttggcaaatgtacagttatggatggccttggacaaggcagagcagtctcgttggagcttggaaagctcaccaaggagggtagggttgcatacggatgtgcacgaagcctcagggtctgatttgtgcgtgcccatcaggaggccccatcctgccaaggcccgtgctgaccctggagaaggtgtgtcccccgtgagtcaccgtgccgtggaatatcacaccagcactacgcagctggggttaaaatgttcaggatgcctggaaggggagaagcctttttctgagaggtcacctaggatgggatgaggagtgcaagcatggcctcatgttccctccagccagtgggcactgtgtgccttggatgtctcccacctgtcagccaggctccaaccagggaagcagaaactactccaatatataaagcagagggattatagttacagtactttaaacattatacatacgtatgtatatacatatacatatgtttatgtgtatctgtatacattattctaaaaatgtggactggacatggtggcttatgcctgtatcccagcactgtgggaagccaaggtgggtggatcacctgaggtcaggagtttgaaaccaggctggccaacatggtgaaaccccatctctactaaaaatacaacaattagttgggcgtggtggcgggcacctgtaatcccagctactcaggaggctgaggcaagagaatcgcttgaacctgggaggtggaggttgcagggaaccaagattgcgccactgcactccagcctgggcgacagaatgagcctccatctcaataaataaataaataaataaataaataaataaataaatgtacatatatacttatagttatgtatgcatgtattttacgtatgtatgaatacatacatattagtttttgttttggaattattttagacttatagccaaggtgcagaatggaacagggtgttcccaaacacttgtcactcaccttgccgtaatatgaacaccttacataactatagaaccattatcagaagcaggaaattaacattggtacaatgctcttaactagaggctttattcagatttcaccagttgttccacgaacgtccttttcctgttccaggatccaaatttgcatgtaattgccacatctcctctttcccttccaatctgatattttgtcttctcttttcttttacaaccttgacacttttgaagagttctggtcaatgcttctgtagaaagctcattaatttgggtggcgtgatgttttctcatgattatgtcgagagggtgcattttgtcaagaataccccagaagtgatgtgcccgtctcgatgcaccacactggggagtccatgatgcagatatgttttgttactggtgatattaaccttgatcacttggctaaagtggcatctgatggtttctcatttttctctccccactgacagccacaattaataaatatcttgggggaaatactttgagactgcaatgatccaagcagagggaatttaatacaaagaattgattactcctacctgagaagctccacagcccagaaaatggcaacctcaggtagctagtaccaactcttgacctgaggctcaaagaaagaaggtgttgccagagtccagggttcccggtcatgcatagaagcctgtctggtgaggctggagccaggaaggagacccaggcactgctggtaatgctgcctgaggcatagagagatgggagaaatgccctcttcctgtctcccattggccaagcccagccagaagccagctgacgtgggagcctgggaattgtggtccgcaggggtcagcccctctgcagtatagtggggatgggcaaggagtgcctctgacaccgttgccacttctctagggctccactgacccttatggtagccacaggccacgcatggctcttgaaatgtggctcatccaaactgaggtgtgctctaagtggatttctaacacggaatggaaagaagaatgtaaaatatctcattaacaacttttcatattgattacctgttgaagtgataatattttgatgtattagattaaatataatatattatttcatttaattttacctgtttcttttaaaaatttggctactagaaaatttaaaattccgcctgtggtttctatgtgtggctctcattttgtttcagttggatagtgctgctctagggtacacttctacccagcctatgtcaacaacattgtaagaataacatccatcctggacaaaggtcatacccttgagccatgctcaggagggcatgtccagccaaggttttagaaagccaggactgcactggcacacactcacagctctgaccatgtcatcaaacatacagagactgggcttccctctgctttttcttttttttctttttctttttctttttctttctttttttttttttttttttgaggctcactctgtcacccaagagcattgtgcattggcacgaccacagctcactgcaaccttaaattcctgggcttaagcaatcctccagcctcagcctcccaagtagctaggacagcaggtgcatgccaccatagctggctagtttttgcttttgttttagtagggacaaggtgtctctatgttgcccaggctggtctcagactcctgggttcaagtgatctcctgtcttggcctcccaaagtgctggattataggtgtgagctgcctggccctcctctgctctttatgtatcatgcagggtgtaggttaaggtcaatattcaacaacttcagctccggaggctacctaatgtttaatacaatagtaaaaacactatcatatacctggatagcatttgacaggaagggctatatgactgctactgcattgtatctatacagtgtttttatagctcacaaaggtctttcatcccagcctcccagccagtcacccagcatggctctcctcattttatagatgacagaatgaagcctgagagatcacatggatttctgtggctcccagactcccaatgcatcccttggggagctcgtcaaaatgctgatcctctggccctggcctcacagagtctaattcagtgggtaaagcctggggcccagggacctccatgttgcagactctggggactctcgtgcagatggttgtcagaccacactttgggacacagcagccctctgagttctcaggggatgtgagtggcagggcttgtctgagccatgcttctaatagccaggttgggctctttcctggtgccaaacccatcatcttttggagctaggcttctaggaagaccaatacatacctgcctcactgccatctctggccacacccgtgatgtaatagagggttagtgtggctgaagccaggtcaggcggtcaaacatggtgctggttgtaccaaactcagaataagttttgtcatatctggctgactttgggatatagccagtctttgtcactgtgctgggctcaggtgaagggaagtgagtttgcctcccccaagcggacaccaaagcttcatcttgatgtggagcttgatgatgccaaattgggtctgatggttgagaaagatttgcattgaaatggccaaataggattccacagtcatgctaatggggaaggccagggcacaactcctgcagcctggcagagtgagcatgggcctggctgtcctgccgtcactgatcgctcctttctgttctgcagtggacagcggactgcagcgaaccgctggacagcagctgttccttctcccgagggcgagcccccccacagcaggtagggaaccagctctgcgctctgtctgggggtgtcctatgtcttgtctgcctgggttcctgggccggcccacagtggctcctgaggagtggtgacatggagagtgcagagaggtgggagaggggagggggcatctgttccctggaaagccctccctaactccctgcccacagggaagctcccactcccccaaactcatcgattgatgagatttctttttagtagctgcgttctatatattaacacatatctggaagcagcccagatgttcactgaggggaatggagaggtgccttgggatccatccttacagtggaatattacacggctctcaaatgactgcactgagggttcaggtaccgacattgcagccccacaaacaatgggactcggcattttgatgctggtgggtgctttggatatcacttctgctccagatctgcagaaggcctgggaggggcagcctgtgggggagctgtcagagacctgtccatccccccagccaaccaacagtcctgggaccccgccagagcctgccacctttctccctgctgcttgcggtgaggtcctgagaggcttgtgggtgggttgcatggctgggagggaagggaggcagctgctgctctttgagagctgccctggtgaccccctggccctccaccaaaccctatggtggtccagctgttctcactgatacctcatccctgcctgcaggagcctgtgggattagaggctgaaaaaaacatgtgtccccatctcgagtccagcctccgactatgcctgtctggaaagcggagggagcccctgcaggctcctgcgaggggccatgcctggtttcagagccgctgcagtcatgggttgccctgggcctgcttgctcatgttcagcttcagtccacttaatcatgttcagcttcggtctcctggcagattcacccaactcctctattctgtcccgagagaagctggtcagtggccttggttctagatctttcttaggctgtagggcgtggctgccccatggtgtggagggacggctgcccaggatggttctttcacgtgacaaaatgtgcttgtacgtcttgtttcttaagaaggaggccataataagagccccgggggtggggggtgatgggagacctggagtctcgtttttgttctgccgcaaacttggtggcaaactcttccttcttgggtctcagcttcctcacataaaacccagaaggagcctcgacggcctctgagggtccttctaacatctccgtgccatttgcagatgaggaaactgagtcccacggaggtgccacttgtctgccctcctccccatacggcactgctaccttgcccaactgcaggaggtggccttctagggggtgcctctgtctctgctgcctccctgcctgggaccccatgttatgctccctgaccccctagcttttggtctaggccctgctcctcaggggcactgtctctagctcctgccagttattctggggtctcctaaaaggagattcccctcactcttcagcagcaatggtgaacttggatttggggactcaagcaccagagagaggctttcaggaagtgcttgaagctcttggatgggaaataagaggtttgtcactgagagctctctgctgtttggtcagcaggtgtctggttctggaatgttccaatgaagagtcctttttcctctcctctttaccatctttctgggggcttgtctgctgtctttcccctctggtccccttctccacatcactcctgatagggtctccaggggttcaggaagtgttctaccccctttctcccctcatctgcctcacctcccgcacccagctgtcctctcgggtctgccttccccacctgcaggaggtcatgtaggggttcgccagataatatgggcccatggagcagggctgggggcttgtggagtggggttaggtatgggcttgtccctgctccaggcaccctaacaccgcaaggagcagctcaccccaatctcaccttcaagaagcagctgagcagttgactcggggtacgcagtgtttgacaaaacgaaatataactcaacttaaaagtgaagttgtgaaaagctcatattaaatcctttcttgacaggtggaactgagacgtagcttcattacaggggaggagcccaaggagggtggaggacagggtctctgcatagaaccccacctaatcacctgacatgcccagaggcaaggttttgtgggagggacctcctacaggccttaggggcactggcattcccatcacccctgacctgcggtggccgactgatcatctcagagggaagagggagagatgtctacttccgagaagtggaagaggggctgggccactgagggacaccccctgccacagacatgtgtgcctggtgccgtgttggtcttgggtgcagagtctgcgacgcccatgcctggagagccggctgggacggaagggaaggctcagtcagaatgctgggtttgcctgagtctggcgtgggatgcaccacctgtgctgtatgaaattgcttacagccacggaaacctctgaaggttggagagggtctttcaggagcgatttcttagaggtttgtcaaccaggagtgtttgcagggacctggtgctgagctcccggtgggcttgaagccagggacctgccttcaagggcgtcactgctaagtgggaaggacaagacacaggtgtaaaaaaatgcaccctgcacggcatgagatggggcccagggggcagcctggagttcagaaacctgggcaggtgcacagaggaggtgagggggagttgcacctcctggatggatggccaaggttcagacctgggtgctgcagggggaggcaggagcatctgtgggcctgaatttacacgaggtctcctgtggttggcagcaccttggttcagtgatgacaggctttatttttagacatcagagactgaatttattaggtacaaacaacagggtggcataaacaagaggaatctttatttttctcttgccaccagcctggatgggcgtttggggctggtgtggtagcccaacagtgtgggggccggctccttgcttctcactgctctaccctctctagagtgttgcccttggccacgtggcccatggtggctcatacccacgtccatgcatctgcccgtggggacacccacctgggtttccttcccaggaaactctgatttctgcccacgaagcagccatctcctgttgccccctactggagggatcaaagctgggcggcttcctttgagtgacggcaccccaaggaaagccccatgtagctggcctgtggcagtgtccttgtcacccctgtcatgcaggggctctctgatggaggaggacccaggcagctgcccactgaagggtgcctttgctgagtgccactctgatgggatgctgctgttcccttcatccttcaaggctcccttcagcctggcccaccagaggcaagagcacaggaccagctctcggggacaccacccatgagcaccccggctggctccttgctgcactcacgcgcccaggcagacaccctcacactgactcatgctgttgccaagctgttccgcgcacacctgcctgtgcctcagccagctggtcaaccctaagacgggagtcagggcgggctctacttcctcaaccacttctggcctagggccttgtactcagtaggcactcaatagtgatgcctgagactgcactgagttggcccaggctcagtctgtgcagtcattccctagtgggcccttttcctcctgccacaccaactttgatgagctttctggggccatcaggatgatgggagaacactgctaacccattttcacccgtggggacaattagtttcagggagaaactgaggctacatggagatgcggtggctggctgctctggtgctcctcttgactgcccacgttggctgcacatgtccaggaaagtagagttggcaggaagatgcagaggtcctgcattctgccaagcaacctctgggtggtgggtcacagaccatgccctgcaccagggcccagggcccagatgtggccccatttgcagattagtcatacactgggatgattgattcatccccagcaggcttccagcctcatcctgtttgttattttagctaatgtcaaaaagaaaaccttgctttttctgaaccctttcagaggcagaaagtgggggcaacctagaagagattgggtcccacgagagaggaggaagagagcccagagagtgtagagcataaaaagggctacagatagttcagaagaggctgaccagctgccggcaactgggattcagctgtatttgggattgcctgacatcctggcatcctcttcccaaaagactcacccatcacctagtcatttagttaggacgtcagacgtttccagctttttattgtaatgggggaaatgtatagggattgttgaaatgagagactgcagcagcagtacattcagaaagcttttcaaggtgttggcatgggatttagaattcaggaaagaaaccaaatgcatgggaaaggttgtatggggtcaggagtgagcagctgttttccatctgcacaggtgtgccaagaacaggaaattaatatgcaccacaacagcacagcctctgattagacttgggaaggacttcccttgacggaaggacttgttggcccaccgtgttggctgttaagcaaggtgatgaaatctttgctaggaacctgatgagcacgactgcctatcaggcaggttcacctgaagccctgggaaagatgggggtgtgtcacaaatgatgactttgagttttgactgagggcctatgatcccaacattccctggaataagtgaagggcactctcttgtttcatcctgacgccctgtagcaaacagaagcataaagagagtcaaagagccttgtcccaagctccaggagaaccagatgttgacccaggagtgacactggctccaagcacctattcagaaaaacaactacacagactccttagagtctctccagaaatctctgtttgcattctgtaactccgtgaaacacccaactggatccaaatcactgccacagcaggtctgggtcttcctaatttctctactgttccccatcccctgatacctttgccaaccttcaggccagctatatgggcaccaacattgactccgacccaggggataacagatggtaggtggaggagaccctcaaatacactaattacctctggccccagaaaaagatggaaggagttttctgcaagtcaacttgctacccttcagtaattataggatttggttctgtgctaatttaaaaaataattagtgcaaatgatatcttagtaaaagtgcctacattttttagcacttccttggatacgtaagaaataccaggtatatgttcatagtgctgctctctgtttagttcgtatttattgagtccctgctgtgagcccagcagatgcgtctgagtgggagcttctggatcactgccagtttgtagggtaaaaactagtttacacagaacaagatgacaacatacacgtaagatccccaaagagatgtcatcctggccacaagaactgtggtgattccaaagagtggttcagttggtctctgtgggtagggaggtgtcttgcaggacatgaggcctgacctatgcctttgggaatgggtaggatgtttgactagatggaagggaagagagaagaagatgaagagagaagacatgatgttagcaaaggttgagtagggcacagtgttgggatgttagagtaatagttaggaggcagcacagctagaggaggatcatattgggtgttactcaagtggggggctgagaatggtgaatgcagaggggtctgtgtgtgggctcagatgttggaacctctgtccaacccagcccctgttgtgtgccttgaacttttttcttgtatctttctctggtgttccatacaggcaaagtctgttcccctgtatcagtcaggatagcctagataatgctgcagtaacaaacaagcccaaatctcagtaacattaacattaaacaaccaacaaccaaacaatccaaatcttagtaacattaaacaaccagggcacagcttggtggggcagttccgttttaaccagttgccatgacagagaaaaaggagctctggaggatcatgcattggcagttcagtgctccagcctagatacaacacttgtcacttccactctgagcttgttacccagaacgggtcatgtggcctcatccaaccataagcacattaagaagtacaacgctactctgtgcctggaatgaggggaaccagaattatttggtgactggctggaatgactgtcacatgccctatctctagtagcagcttcccggaggctggggctgaacttttctttccctcttcttcttcaccacctcaaatccttgatggaactcaaggattaaacttgtgggggcctagggtagcgcttagctctctgaagatttgctgaaaaatcaacttgtaaaaggcagattaataagagaaaaggcatacacatttatttaacatgtatacatgggaggctgcagaatgaagacccaaagatacagggaaaattatctatttttatggttaagttcaacaaagtatggacagttgtagaaatgggattggaccaaaagggcatgatctaatgctaatagacaaaatggggaaacacagcaaggcctgtctgtctagactctccctggcctgtctgtgcagcattccttccttctgagttggggcaggaccctctctggaatgggggtgtcatgacctataatcaaacaaagcagatcagataatttatttatggccagtttttaaaaagaaaggcagagggagaattagagctctatctttaggtttcatggctggctttgggagaaagaggctgtggtttctcgtggtggggaagagggagtctaacttctatggctagcttcaggggagagtgagactgacaggcaggagggcagaaagtcagagaaagacttttgcttctgaggctgctgctgaggccttcattttgggatattgttttctgagccccaacaaactcccatgcactggagtttaaggcctccagtgaattctgaaacatcatgggctctcagatggcaggaagctcagaggtcacctgatccaagtccccaccatgttagcaaaggttgatttccagtagcagggagcatttccagcagcagggagctcactgcttcagaaggcatctcagcatattgttaggcagctccattaataaaaaagttctttctttgattcagccgcaagcccccttctcattgctccagctgacggtttttatttaactcttttgcttgtgtcttttgcctacttactttcctcagcagccgagcacggcaagtctttttaagctaaatatcccctttcctgcatgaggaattgcctttgctgtggttgggtcattcctttgtttatttatttgttctttcacctattgatcggctccaatcagccagtcatcactgagggctgctgtactccaggttgggcactgggcactgggatggtgaggaacatagccatggtggctgtttgcatggagggtagagtggagagaacagatgctgaagctgcagtgagaagatgtctgggacatgacacagtggtccttcgggcctgggtcacatgcccaggagcactagaagtgtgcgctgtgattccccttaacattcctcccagaaacaaacatggcacaacctctgtgctcaccagcgtgtatgtctgtcttccagaaaatgccatctgtccttatcctcaaagtgccttctggctccagctcacttggaggaacaggatgccacacttactaaacaatgctgacaactagctcctatagggagaaccatcagcagccatgcattgggtgcttgctgtatacattctgagccacatggcctggtctctgcactcagggaagctggaatctgcttagggaaataagctattctggaggagatggcagcatgtgagtatggggaggagtaggctggtgtccgcacagggccttgcattgtagcaggagaggtgagacatacaggcaaagtgggagccgccatgatgtcgcggaagcagcattgcacctgggtttaggagatgtgctttcagcctgggctgtgcttccaacttactattggatccaaacttactattggatcgtggataagatacattatctcactgcagcctcagtttctgctctataaaatgaggaggtgaactagatgtaaggccatcaaaatgtcttgttgaaaatatagacctaaacttctgcttctggaaaatgcaatagatgttcttatctatatttctcctgctaaatacaactaaaaacccaagacattctgtataaaatgaacgtaagaagactcggagaggtggagggaagaaggcagacctgctagggtgcccagaacctgaggaacgacacagcgaggagcttgttttctttttgcctcatgtgtcccatacttggcactaggaaatgctaatggacacaggcaaaaaaaaaaaaaaaaaaatcccaataaaaagctgctctctacaggaaacggactaagaaaagagaaaaagataggatagagaagaaggaaaatgataggaaaagatctagcaaaacaaaaaacttttcgacagtcactgctgtaccccagccaaacaccacagaacacatccccacccccatccatcccagccaagaccaagtgggagctcagatcccacccctgctgggctatcagaggggctccaaccccctaccagagtagtgtcagagaaggccagtggggagctgtgactttcgtccccgccaactggtgagaaggctcctacccacgccccatggtgtcactggagacagcaggaacctgacttgcacccccactgggcagtatcgaggtgtccctctccttcctgctggggtggtgtcagaaatagtgagtcagacttcatagactcccagggatgatgaggccagccccactgcatgtcagaggggaccacatggggatccggaactcccacctccacccagcggtgacagcaagcacccctgcggcgtcggaggaggttgagtgggcaacctggacttccacttccacctggcaataatgaggctgtcccctgcccttttcccctgccagagtggtaccatgaaacacgagttaaagcaggaggtttaaatatgactctctcatgagctaacatgaaaatgtcctggtttcaattaaaaattgtttgtcatatcacaaacaaactgaaataatcaatggatgttaacactgagatgctaaattggactttatcatcattaaatttttgctctgggaaggaccctattaagaggatgaagagacaagttacagagagggagaaaatatttgcaaaacatatctgacaaagggctcgtatttagaatatataaagaactctcaaaactcatcattaaaaaacaatccaattagaaaatggacaaaataaagtgacatttttcactgaagacgtttttccctgaaggtgatgtacagatggcagataagcacacaaaaaatatgcaacatcattagccatgacggagacgcaaataaaaccccaacaagacatcactatactccaatcagaatggttaaaataattttttttaaagtgacaatgtccacttcaacttggcagcattaaaaaaaaaaagtgacggccaagagcggtggctcatgcctgtaatcttaacactctgggaggccgaggcgggtggattgcctaaggccaggagttcgagaccagcctgggcaacatggtgaaacaccgtctcaacaaaaaatacaagcattagctgggcatagtggcacatacctgtggttccagctgctcggaaggctgaggtaggaggatcacttgagcctgggaggtggaggttgcggtgagctgtgatcaaaccactgtacttcagcctgggtaacagcgagaccctgtctcaaaaaaaaaaaagaaaataaaataaaaacaaaaaggaaagaaaaactaaatgacagcgtccaatgctggtgagaatgcagagaaactggatcactcctgcagtaggagtagggatgtagaatggtatagccattctggaaaacagtttggcagtttcaaaaaaaaaaaaaaaaaaaaaaaacgaaacctgcaagtaccatatgatttgattgagcaattgcactcctgggtgtttatcccagagcaatgaaaacttatgttcacacaaaaacttgtactcaactgtttgtagcagctttgttcacaatacacagaaacctggaagcagctcaggtgatcttcagcagatgaatggttaaacactcagcaatgagaaggaatgaatgcctgatgatgcagcagcctggaggagtctctggaaatcatgctgagtgattttcaaaaagccagtcctccaaagtcgcatactctgcaattccatttatataacattcttgagagggcaaagtaatagaaacggggaagaggtttgtggttgccaggatgagggaaggggtaggggcaggaggaaagtggatgtggctataaggggcagccttgtgatggtgggagtgttctgtgtctccactgtatcaatgttgatacccggagatgctgagttggacttcatcataattaaacttttgctctgggaaggatcgtattaagaggatgaagagacaagttacattgtggcattgaactatactttccccatggagggaaactgcgtatagggcacaagaggtctctttgtattattttttacaagtatgtatgaatctacaaccacctaaaaataaaaagtgtaatttgtaaaaagtataaaaagtgtaatttacaaaatacaaaaagtaatttgtaaaaagtatttctatttcctcagaaccttacatggagattccacatagaaacaggaaagggatagaactgtttttagggggcaaggggaggagccctgcctgctttctcccccacccgcccacctcatggctcttagaacatctctgcaggactcctaggtcaccccccagaccagatgagctctcagcctctcctgtcatgaccttctgtagttctgagtctggtactggcagaaaaggacagaactttggggcctggggagttcaaagaaggcctccctgtgaggcaaccttggaggatgggatggtgttggaatggggggtgttgattttccccatctcctggaagcctttccctggcaggagctggggacagttgaggaggatcccattatttcagcaggttttggacaggcagccagacagaaatggcctctggtgtggccctgtccaggacaggtccatttaaaacctaaatcacaaccttaattagctgagagtgggcagagggttggcctaggagaaatatacttggccacaggcattatcattgtctcctatctctctctggcctttgggtcttaattcaaagaaaaagggagcatgggggaaaagacaggatggacagacagacacagatgtcccagcatgaaaggaatggcctttccctctcccagactcagctttagtgccacccagaaagctgtctctgctgggctctgccctgctgttctcctgcttcaaaggccccttgggggtctatttccccctttcccagctgtgtctggggtgccgtccttcgttctgaacacacacacacacacacacgcacacacacacacaaacacacacatggtgttgccatgataggcctgtttctctttgggttctgccccctgccacctccccctgtgctttccccctcagttgctctctgagaagattcaaccattctcaaagtctgctttagtttgggcctgagaggagtttcagatctggcccataggaagcctctgttttggcccaggagatgagtctggggtcctctggtccagaacatttcatgtaatgtaaaagccctcatagtgtctctcatatattccaatatagagtcaccaatgtagtccatgtagtcgtgggaccagtgaggaaacacaggtccaaaaagccagagtgaggctgggcgtggtggctcacgcctgtgatcccagcactttgggaggctgaggcgggtggatcacctgaggtcaggagttcaagaccagcctggccaacatggtgaaaccctgtctctactaaaaatacaaaaattgctcgtggacccattccaagatggccaaataggaacagctctggtctgcagctcccagcatgattgatgcagaagacaggtgacttctgcatttccaactgaggcacctggttcatctcactgggactggttggacagtggacgcagcccacagaaggcaagctgaagctgggtggggcattgcgtcacccgagaagcacaaggggtcaggggatttccctttcctagctaagggaagccatgacagatggtacctggaaaaatgggacactcccacccaaatactgcacttttccaatagtcttagcaaatggcacaccagattatatcctgcagctggctcagcgggtcccatgcccatagagccttactcactgctagcgcagcagtctaacattgacctgtgaggcagcagcctggagggggaggggcgtctgccattgctgacgcttgagtaggtaaacagagcagctggggaagctcgaactgggcagagccaaccatagctcagcaaggcctgttgcctctgtagactccacctctgggggcagcgcatagctgaacaaaaggcagcagaaacttctgcagacttaaacatccctgtctgacagctctgaagagagcagtggttctcccagcatggtgtttgagctcggagaatggacagactgcctcctcaagtgggtccctgacccttgtatagcctaactgggaaacacctcccagtaggggccgactgacacctcatacaggcaggtgcacctctgggacaaagcttccagaggaatgatcaggcagcagtatttgctgttctgcaatatttgctgttctgcagtgtccactagtgatacccaggcaaacagggtctggagtggacgtccagcaaactccaacagacctgcacctgagggacctgactgttagaaggaaaactaacacacagaaaggaatagcatcaacatcaacaaaaaggacatccacaccaaagccccatctgtaggtcaccaacgtcaaagaccaaagttagataaaaccacaaagatagggagaaaccagagcagaaaagctgaaaattctaaaaacaagagcgcctcttctcctccaaaggattgcagctcctcgccagcaatggaacaaagctggatggagaatgactttgatgagctgacagaagtaggcttcagaaggtcggtaataacaaacttctcctagctaaaggaggatgtttgaacccatcataaggaagctaaaacccttgaaaaaagattagacaaatggctaactagaataaagagtgtggagaagaccttaaatgacctgatggagctgaaaaccatggcatgagaactcgtgacgcatgcacaagctttaatagtcaatttgatcaagtgtaacaaaggatatcagtgattgaagatcaaatcaatgaaataaagtgagaagagaagtttagagaaaaaagaataaaaagaaacaaacaaagcctccaagaaatataggactatgtgaaaagaccaaatctatgtttgattggtgtacctgaaagcaaaagggagaaccaagttggaaaacactcttcaggatattatccaggagaacttccccaacctagcaaggcaggccaacattcaaattcaggaaatacagagaacaccataaagatactccttgagaagagcaaccctaagacacaaaattgtcagattcaccaaggttgaaacgaaggaaaaaatgttaagggcagccatagagaaaggtcgggttacccacgaaagaaagcccatcagactaacagcagatctcttggcagaaactctacaagccagaagagagtggaggccaatattcaacattcttaaagaaaagaattttcaaaaaaaaagagaattttcaaccgagaatttcacatccagccaaactaagcttcacaagagaaggagaaataaaacccttcacagacaagcaaatgctgagagattttgtcaccaccaggcctgccttacaggagctcctgaaggaagcactaaacgtggaaaggaacacccagtaccagccactgcaaaaacatgccaaattctaaagaccatcgaggctaggaagaaactgcatcaattaacgggcaaaataaccagctaacatcataatgacaggatcaaattcacacataacaatattaaccttgaatgtaaatgagctaaatgcccaattaaaagacacagactggcaaactggataaagagtgaagacccatcagtgtgctgtattcaggagacccatctcatttgcagagacacacataggctcaaaataaagggatggaggaagatctaccaaacaaatggaaagcataaaaaagcaggggttgaaatcctagtctctgataaaacagactttaagccaacaaaaatcaaaagagacaaagaaagccattacataatggtaaaaggatcaattcagcaagaagagctaactatcctgaatatatttgcacccaatacaggaccacccagattcataaagcaagttcttagacacctacgaagacatttagactcccatccaataataatgggagactttaacacccaactgtcaatgttagacagatcaacgagacagaaggnnnnnnnnnnnnnnnnnnnnnnnnnnnnnnnnnnnnnnnnnnnnnnnnnnnnnnnnnnnnnnnnnnnnnnnnnnnnnnnnnnnnnnnnnnnnnnnnnnnnnnnnnnnnnnnnnnnnnnnnnnnnnnnnnnnnnnnnnnnnnnnnnnnnnnnnnnnnnnnnnnnnnnnnnnnnnnnnnnnnnnnnnnnnnnnnnnnnnnnnnnnnnnnnnnnnnnnnnnnnnnnnnnnnnnnnnnnnnnnnnnnnnnnnnnnnnnnnnnnnnnnnnnnnnnnnnnnnnnnnnnnnnnnnnnnnnnnnnnnnnnnnnnnnnnnnnnnnnnnnnnnnnnnnnnnnnnnnnnnnnnnnnnnnnnnnnnnnnnnnnnnnnnnnnnnnnnnnnnnnnnnnnnnnnnnnnnnnnnnnnnnnnnnnnnnnnnnnnnnnnnnnnnnnnnnnnnnnnnnnnnnnnnnnnnnnnnnnnnnnnnnnnnnnnnnnnnnnnnnnnnnnnnnnnnnnnnnnnnnnnnnnnnnnnnnnnnnnnnnnnnnnnnnnnnnnnnnnnnnnnnnnnnnnnnnnnnnnnnnnnnnnnnnnnnnnnnnnnnnnnnnnnnnnnnnnnnnnnnnnnnnnnnnnnnnnnnnnnnnnnnnnnnnnnnnnnnnnnnnnnnnnnnnnnnnnnnnnnnnnnnnnnnnnnnnnnnnnnnnnnnnnnnnnnnnnnnnnnnnnnnnnnnnnnnnnnnnnnnnnnnnnnnnnnnnnnnnnnnnnnnnnnnnnnnnnnnnnnnnnnnnnnnnnnnnnnnnnnnnnnnnnnnnnnnnnnnnnnnnnnnnnnnnnnnnnnnnnnnnnnnnnnnnnnnnnnnnnnnnnnnnnnnnnnnnnnnnnnnnnnnnnnnnnnnnnnnnnnnnnnnnnnnnnnnnnnnnnnnnnnnnnnnnnnnnnnnnnnnnnnnnnnnnnnnnnnnnnnnnnnnnnnnnnnnnnnnnnnnnnnnnnnnnnnnnnnnnnnnnnnnnnnnnnnnnnnnnnnnnnnnnnnnnnnnnnnnnnnnnnnnnnnnnnnnnnnnnnnnnnnnnnnnnnnnnnnnnnnnnnnnnnnnnnnnnnnnnnnnnnnnnnnnnnnnnnnnnnnnnnnnnnnnnnnnnnnnnnnnnnnnnnnnnnnnnnnnnnnnnnnnnnnnnnnnnnnnnnnnnnnnnnnnnnnnnnnnnnnnnnnnnnnnnnnnnnnnnnnnnnnnnnnnnnnnnnnnnnnnnnnnnnnnnnnnnnnnnnnnnnnnnnnnnnnnnnnnnnnnnnnnnnnnnnnnnnnnnnnnnnnnnnnnnnnnnnnnnnnnnnnnnnnnnnnnnnnnnnnnnnnnnnnnnnnnnnnnnnnnnnnnnnnnnnnnnnnnnnnnnnnnnnnnnnnnnnnnnnnnnnnnnnnnnnnnnnnnnnnnnnnnnnnnnnnnnnnnnnnnnnnnnnnnnnnnnnnnnnnnnnnnnnnnnnnnnnnnnnnnnnnnnnnnnnnnnnnnnnnnnnnnnnnnnnnnnnnnnnnnnnnnnnnnnnnnnnnnnnnnnnnnnnnnnnnnnnnnnnnnnnnnnnnnnnnnnnnnnnnnnnnnnnnnnnnnnnnnnnnnnnnnnnnnnnnnnnnnnnnnnnnnnnnnnnnnnnnnnnnnnnnnnnnnnnnnnnnnnnnnnnnnnnnnnnnnnnnnnnnnnnnnnnnnnnnnnnnnnnnnnnnnnnnnnnnnnnnnnnnnnnnnnnnnnnnnnnnnnnnnnnnnnnnnnnnnnnnnnnnnnnnnnnnnnnnnnnnnnnnnnnnnnnnnnnnnnnnnnnnnnnnnnnnnnnnnnnnnnnnnnnnnnnnnnnnnnnnnnnnnnnnnnnnnnnnnnnnnnnnnnnnnnnnnnnnnnnnnnnnnnnnnnnnnnnnnnnnnnnnnnnnnnnnnnnnnnnnnnnnnnnnnnnnnnnnnnnnnnnnnnnnnnnnnnnnnnnnnnnnnnnnnnnnnnnnnnnnnnnnnnnnnnnnnnnnnnnnnnnnnnnnnnnnnnnnnnnnnnnnnnnnnnnnnnnnnnnnnnnnnnnnnnnnnnnnnnnnnnnnnnnnnnnnnnnnnnnnnnnnnnnnnnnnnnnnnnnnnnnnnnnnnnnnnnnnnnnnnnnnnnnnnnnnnnnnnnnnnnnnnnnnnnnnnnnnnnnnnnnnnnnnnnnnnnnnnnnnnnnnnnnnnnnnnnnnnnnnnnnnnnnnnnnnnnnnnnnnnnnnnnnnnnnnnnnnnnnnnnnnnnnnnnnnnnnnnnnnnnnnnnnnnnnnnnnnnnnnnnnnnnnnnnnnnnnnnnnnnnnnnnnnnnnnnnnnnnnnnnnnnnnnnnnnnnnnnnnnnnnnnnnnnnnnnnnnnnnnnnnnnnnnnnnnnnnnnnnnnnnnnnnnnnnnnnnnnnnnnnnnnnnnnnnnnnnnnnnnnnnnnnnnnnnnnnnnnnnnnnnnnnnnnnnnnnnnnnnnnnnnnnnnnnnnnnnnnnnnnnacacatgaaaaaatgctcatcatcactggccatcagagaaatgcagatcaaaaccacaatgagataccatctcacaccagttagaatgacaatcattaaaaagtcaggaaataacagatgctggagaggatgtggagaaatagggacacttttacactgttggtgggagcataaactagttcaaccattgtggaagacagtgtggtgattcctcaaggatctagaactagaaataccatttgacccagccatcccattactgggtatatacccaaaggattataaatcatgctactataaagacacatgcacacgtatgtttgttgcggcactattcacaatagcaaagacttggaaccaacccaaatgtctaccagtgatagactggattaagaaaatgtggcacatgtataccatggaatactatgcaaccataaaaaaggatgagttcatgtcctttgcagggacatggattcagctggaaaccatcattctgagcaaactatcacaaggacagaaaaccaaacaccacacgttctcactcataggtgggaactgaacaatgagaacacttggacacagggcggggaacatcacaccccagggcctgtgtggggtggggggcagggggagagatagcattaggataaatacctaacgtaaatgacgagttaatgggtgcagcaaaccaacatggcacatgtatacctatataacaaacctgcgcattgtgcacatgtaccctagaacttaaagtataatttaaaaataataataataataaaaatacaaaaatttgctgggtatggtggcttgcacctgtagtcccagcaactcgggaggttgaggcaagagaatcgcttgaacctgggaggccgaggttgcagtaagctgagatcacaccactgcactccagcctgggccatagagcaagactaaaaaaaaaaaaaaaaaaaaaagaagaataaaaaaagccggagtgactgaatgaggccgcaggaagcagaaagcaggttgcaggctgagaatcctgttttctccactctcagctcaaaccagaccccctgtcccacagctagctccccagggaaccccgtgtccatgaagtgagagaaccgtattagggtcgggcttgcctcttgccctcatggaatctggaaggacatcctgcactgagaagggtgtggactgggactgggagtcctttggggagtggagactgcaccacctttatctctctcatgcccagagctgggtcctgcacagcccagctgctcagtgactgagggtgcactgtatcagggggtttccattcaggaggccggggctgagggctggccacctctgccccagtgtcacctgatgtagcaggcctgctagggaaatccacaccagcctgccctagaattctctaggggaaacttcccccatgactgtcccaacaatagagagcatcctcccgctgtcctatcccattcagcctagtttctaaacactcacagcctggaattgtcattacacacatgcccccacatatgcacttgcacagcaaaaatcactgcacagttgtgtattcataaagaaaagccagcagctagaagatttgttgttttcactgcatctgactttgtatgtttttctatcatacagcaactcactctcaccttgttgcattcatgcatgtgtggagaccgcagcctcatcgcatacccactcacattccacaatccctctctcttcactgcagatgatgcacttcctccaccagcactgccttcccaatcattaacaaagataggtgtggagaatacagatgcttgcaggggagggatacgttcctgctttatggaaatctctgcagtgggttcagtttacttgactgaatagaataactgcatgcatagtgtacagtggttagagcatggcctctgggccacactgtctgtgctcccatcctggtaactggctccatgaacattggcaggtgctctgtgcctcagtctccccatcagtaaaatggggatggtgatcatactatctgcttcttagggttgtagtaacagtgccacgcttgggcagtgctggcacatactgcatgctgggtcaatatctcctattgtcatcatctttattcttggcccttttaggagtctgacctcccctgagctggggatgtctctgaggccttcccagagacaacttcagtttcccttcccacaagcaagctgtttccatttgattttccacatggcttaaagtgctcattatccctctgtgatctgttctgccagcagtatggtgcaccctggtatggggccccctaattgccaataaaaggggctgtcgcgaaggattcagcagtgtttaagtgctaagaacaacccactgaaaaggatgattgtttttgataaggcttctcagaaccttggcatttcagcaaccgggggggcagggcctggatgctgtcagggctggagaggatgctgtgctcagagggaagctgtggttaccagggccaaccatggaattgccaactgcagaatgttctttaagaggccactgaggttttgatgggtagctgacagtgcccagccactgagtctgtgcgaagaaatatttaatgaatgactctgggtcccaaggctaggacgaggggtgaatgggcaggaagatacaacaaggaagtggagccacggttcccaccatcgaaaggggagagagttaacagaaagtgtgttagctgagtatttcccaaagggggttccatggaaccctagtcctgcaaaattctctgtggaatgaaaaggaagagtgaggtagatttctagccaaaaaccttgggaaagaaatattgcatactccacttccacatatgtgaagagttaacatccactgaagaagttctgcaataaaaatttcaacatcgtaacaattttctacattttaataatgtattagcagtcttatcattcagtatataccaaacatttgactatataatctttttgatttttttccctgttaaaacttgaacattttgaggaatgaggaccatttagaggaatgaggctttctgaaagcatcgtctgtgaaccatcccagctacactaaatttaaaccaccaaccctcccttctctcagtgattctgatgcacactgacatttagagccaggggattggtgcttccagagcaccccggggagctctgcagtacaacaatgacgagaggaatcagctctgcacgggagtgtgcagggtacgtgctgtgaacggcatgtgctatgaggttcacagggtgtgggctgctgaggaggctgcagagctgcagagaggaagagtcctcaactagatcctagcaggaaggaagactcatgggagtgggagggtgtggagagaacattcttttgttttcactgagtccaggaagagtatagtagcctaaagtgaaatataactccatacatgctgctgcttcgtgtgcccttgagaggcaagtccaacgcttgcctgggatgagccgagcttgggtccccttcttctctgtcctcagcttgacagccacctctctgtatgggtcctcagtgtgagccagaggtgagggtggtgggagagagaggtgggtctgtttcctggtgagaagttccagaactcaggtacagtctgcctgtgaggggtctgcctgcaggcacctgccttcctgcttctctgacttctctggcttctttggacattcgagggtttgtagaacagctgacacatgtatgtgtatgtgtgtgtggtacatgtatgtttgtgcgtgatgtgtgtgtatgtgtgaggtgtatatgtgtgtgcatggtgtgtatgtgggtgtggatatgtgtgtgtgtgtatatgcctgtgtgcatggtgtgtatatgtgtcttgtatgtatatgtgtgtggtctacatgcatgttgtgtgtggcatgtgcctgtatgtgtggtgtatataatatgcatgtagcatgtgatgtgcacatatagttgtagtatacatgtataccacatgtatatatgtggtgtgtgcacgtatgtgtgtttggtgtgtggtgtgtatatgggtgtggtgtggatgtgtgtggatggatgtgtatattgtataagtgtggtatatatatgcatgtatgtgtgtagtatatacatgtatgtgtgtggtgtgtacgtgtgtatatgtacgtgtggcacacattgtgtggatgtgtgtatgcataccatgcatgtgtgtgtatgtatgtgtgtctggtatgtatatgcatgtatggtgtgtattatgtggatgtgtgtggatgtgtctgtctagtatatgcatgtgtgtagtattgtgtatatatgtgtctgtggcatatgtacatgtatgcatatgcggccctgtggcatgtgtacatgtatgcatatgtggcacttgtatggctgtaagcatttgtctggctccagagccacgtggcagggctgggtgacagagtggccacttgggtgctcagcccagggcaagtgggccctggggaaggacatgtgaaaacgttgggctcctggttgtccagtttagcttggcagttaataactctgttgcgtgaggcctggccccctgggcactgcctgggccaccacctcagcatcaagggacagcaaaggaaagctctgcaggtgagactcttcctgctctgggctaaggctggaaggagatggatgtcttctccacgtgctaggctatttctccagcccctgttgatgaaagtttgcctttagtggttatatgcctgtcttgtgccattgaaacaaaccccaaggaggtgtccagattcttgatatgcactgcagttcttatatcaagtagagtggcaataaggagtgcggcccctgtgtccaaggtgttgccctatacctacttctccagagactcagcttctcgtctgccaggccccgagtcttcatggcgatctccttcctgatattcagacagagaggcccgatgccttgcccactgctctcctccatgtgtccagctcagcggctggggtcctcattcttctcagtgctgtcacctccacctgctgcctcctccagggctgctgagcttcacagctccgggggtgctgtccatatgatattcgttcctggagctgcacccccagggctccctggagctgtgcaaagatggggtccggctccttggtttgtaaagggctcaccttgctggcacttttgttcctcagctctgagaatcagagttgcagtcatcacgggggagggaatgaggcaggaggccggtcagtgtgagagttaacaagactcaagccttgtggcaaaggagaggtgagacccggcccaaaggcccaaggtgggcttggggcagagacctgtggggcagagcgagagaggaaggagaagcagcctggtgccgagttttccagcctggggagggagacacaggagtcaggaggctgagccacagggcgggggtggctaaagaaatacggtgtgtactgggaatggcagggatatcgctgggtttcttgtcatttaaatatggatgtaggctcttgatgtcgttcagggatatgttccctgagttgttgtaaggagttgtggggattcaatgaggaaaatgtgtgagtctgtcacctgtgacgtgtgtcgattgtgtgactgccatggctcttggaggagcactggttgccaccgtgactccaccacctgctccccagctgggccatggcctctctccccaggctcctctgggaatggcagggatatcgctaggtttcttggcatttaaatatggatgtaggctcttgatatcgttcagggatatgttccctgagttgttgtaaggagctgtggggattcaatgaggaaaatgtgagagtctgtcacctgtgacgtgtgttggttgcgtgactgccatggctcttggaggagcactggttgccaccgtgactccaccacctgctccccagctgggccatggcccctctccccaggcttctgtttttcacccccaacatggagatggcagcagctgatcacagggctgttctgcagatgcacggaagggtgggcttcctctgtaaagaataaacacatacatgcaggcacagcttctgccctggctctttccctcccatcagctgggagcacatttccctgaccccaagaatctggaagtccagagattggtgggtcccccgccagggatactgctttggaaatgcccaagtttgccctgcccagtcacctcccttagcccaagggtagtgccccctcctccaggcagagaggttccaccagctctctgcacaggggcattggccccctcacagctgctgccagtgactgttactgtgacctgtcctcgctccctgccagttgaggagtagtagccaagatgccaacctgcaggccaggagggagatttatgtgcccatctgcactgcccttcaactgccttcaaggtgaatcaccatcttcctggaagatgctttgcacttctaggtttggccatgaccttctctacatagttgctctctctttctatctctccatccatgtttcttactctctaagggccttacgggcctcggatcctaggacggtaaatcattcttgacatcctaatcttgattcagtctttcagccacagaggcagtagggtcgtgcttcctcctgttacaaagtggcatctcctcaatcagttggcaggaatccaagctggccctcctgtgtgcctggcttggccactgtgggggcacaaagagaaagaggcagtccagtggaaaagattacagtctacttggggaaggtctaacattcatgtaagagagcagtgaccaagaggtgatccactgaagctgaatttataggcgccagagaacattgggtatttaacagatcagggattagggaagacacgtgtggaggagaggcttcaggtcactgggctgaaggaggaaaatgaactgcatgctgagtgaggtctgcaatagatgctttggaagcaagagttttgtttgcatgtatgatttttttttatctttgctttctatgttatttttggctgctatccccaatgataattacattcgaggcccaggagggggttgtgaacaagccggtcaacatctcgggaggcaggggctgtccccttgggggttgtgtgatagaaggtgagtctctctagctgacctggagtttcagagttgcacttggagcaagcagggccccaggagttggaatggggaggatgtgaggcaactcgaagaaaagggagagaggacgatcctagaacattaggggccacctgcttggaggactggcaaccatgctgtaattgattagtgatatctgccgctggcaggagaggggatggtagcagcacgcatgccagtcagaaggagcccatctacagggcatggtatttcattctgggatctctttatttaaatatgaagaatctgaagtccagactggtgaagtgactttgccgaggtcacacagtttattgacgcaaaaagaaaacgcatgtttaaagaagatggtgaaaatctcttgcagtatatgtcaggagcactgagcttccagctctgggggacccagggggtccctgccatcaagggcccgctatctcctgtgggagagaggtcactacaggaaatagaagtgagaactgcaagaggccggctctgctactgtaagtcacccacacagatagcaagttcagggcagagcgaggtgactgcagtttgggaggccagaggtgcttcctggctgagccaatctttgacagatggggcacattcggagagggcaagaggggagcaaggcccagttgacaggccatggtcaggagcaaaggggattacggggatgggacaggaaaggcatggggagaagcacccagggccatggcggccctgaataaatgtggctgatctgctagaaaggattgtgcaagctctcagggcagcctggaatgaggaagtttcaagttacttagacctgcaggctgcaggctgttggtgcccagagagagggaccagtcttcatgttatcaatgagacccaggaaggctgagggacttgcccagagtcagacagcccaggtggttctccccagacagtcctcttgtcccttcgactccataagccctccacctctcctccaggctctcattacctcctgcctcctgtctgtggcggctggagtgcctggccccttctgcttggaggctggactgtccagcctttccggtttttgtgccctctccttctagttaatcaaagctgctcgctctctctgtctctctctggaagagagattggtttcctcttccagttactatctgagttctttcactatacattcgttagtttgcctgttcctgaacataattggttctcttttgcatctgggttcttttgttccctgtatgcttgtgatatttattcatattgctgcatgttattttactttgtttgtgctcactgcggtgtgatactccaatatgtgaacataccacggtttatttatcgaatcagctgatgacaggcatgtgggtggtctccagtttggagctgtaatggcggatgctgctgtatacgctttctgtacatgtcttttggtgagcatcgggcacatttctgtgtgtttatacctgggagtgaatttctgggtcatacggcgtgcacacgttcagctcaggtggatgtggaagtattgttttaaagagtgtgacgatggaaaccagattgcaggggtaagaagggctggagggcatcaggtgcggtcaggggttggagaatttgccagggagctcaccagccagagagcagagaaaccaaatcatagaagctgcattgagtaaagaggtttctgtctctggggtgggtcacatagggaacactggaggatcggctcgactcagagaaatccagttgctggtgtagccttggtcggtgggggcttctggggagtaggactgaactgtgaaggaaggcagcctccatgggctccccagtgggcctggctctgcagagcccctccctggggagaagcctcagccatcaggctggcagtggtgatggtggctctgggtggtacagagcccttgctgggtgtggaggctttgaggagagagccatgggcctggggcagcaggggcctggacccttctgtatacatctataaaacctcagtgaaacgagggcctatgcctggggggaggccaggagacccccaggcagtcccctgactctgactgggtgcaccagccaccatactcacttgggggctcactccagccccccagcccctcaggccctggccccgtgttctcagcatcctggccgagcaattaatgtcagccctttcacccccatctcttccagaatggcagcaaagacaactctctggacatgctgggcacggacatctgggcggccaacaccttcgattccttcaggtaacctcctcctccctccttccctgtggtgtgaggtccagccggggaaactggcttccttggggacggaatgaacgctgatggttcatgagcaagaggcagagagaagcagagtaggggatgtaggaaggatggggtggaaagaaggccggagagaggaggcggtgagtgtcaacgggagacagtggaggcatggggagggcccccgggatggggctgcagaggctgggccccgcttcccactagcctgcctcatctacctcagggtggccgggtcgtcactttgagctgcttgtcagaggctggagactggcatttggccccttgctctccctggccttcctcaaatgtgggcacgaaaacaaactcaggtgttgcagaggccgctgtgcaatgggcatcaggcccacacttgtttcataagcatgcactttcccacggcagggtgaggaaggtgaggggtggcacctggggctccattctgagtggggctccccgcctggcccctggcggctcctttctgcggatctgctctgccaggttcagcctggccccctggttccgtcagtaactgggctgttgccctcttgcctccgtttctcaccctccctcgccctctagtggtgccacctgggacctgcagccggaaaagctggacttcacccagttccaccgcaaagtccgacacacgcccaagcagcccctgccacacatcgaccgcgaagggtaaggggtgctggggctcttacccagggtggggtggggcaggggacgggagtggcctttgcctccacagggaggctgctctgctgcacaggggactcaggtggctgatgccccgggatgctcttcttatgcgtcccagagctgcaggctcactggcttctcctggaatccctccatttccctctgcccagccccctctagccatgccatccccacctgctcctgatgacccacagtggccctgcttgtcagtaatccacgccagcgcagcagaatcacctgggcggtggcacagaggacaggcccaccccagagtctgtgattccgtaggtgtggactgaggctgtgtgtttctttctttttttttttttttttgagacggagtctcgctctgtcgcccaggccggactgcggactgcagtggcgcaatctcggctcactgcaagctccgcttcccgggttcacgccattctcctgcctcagcctcccgagtagctgggactacaggcgcctgccaccgcgcccggctaattttttgtatttttagtagagacggggtttcaccttgttagccaggatggtctcgatctcctgacctcatgatccacccgcctcggcctcccaaagtgctgggattacaggcatgagccaccgcgcccggcctgaggctgtgtgtttctaacaagttccccagcgggtgctgatgctggtccagggaccacacttggggagcagctggtgtcatgcctgattttacactggcttttctcaccctctatgactttgtgtggcagggttgccttcccttttcaaaagtggtgtcacagcctgggcagacctcaggacgggaatgtgactccagcgagacacagaggtgtgggacaaatggctgctccttcttttatagttttatataatttttaatgaggcagaattcccataccataaaattaaccattataaagtgttcagtccactggcatttagtatgctagacctgttgtgcaactaccatgtctatctagttctgaaacattctcatcatcccaatataaaaccccatacccactaggcaatcattccccatcccatcaccacccccagtccctggcaaccaccaatctgctttctgtttctattaattaatctattttgcatacttacagaaacagtcatatgtgacctcttgggcctggcttctttcccttggcataatgtttttgaggttcattcattatagcatgtagcagaactttattccttttcatggctgaatactagtccattgtatggatataccacaatttgtttacccatgcatctatcaatccttacttgagtcatctccaccttttggctattgtcaaaaatactgctgtatctttttgagtccttgcttgtaattacttgggtgtatacctggggtggaattgctgggttgtatggtaattctgttgaactctttgaggagctgtcaaactgtgttccatagcagctgaatattctgcattcacaccagcaatgtatgagattccaatttctccacatccccaccagcacttgtgcttttttttctttcttggtttttgtttgtttgtgttttattatgatactgatgacccttacttttccttccagccctcccctgctcactcttgtctccctttcacttcaggtctaagtattagtgactttactggacactatcctacatctcacatgtcttcctgctgctatatttgtcccactcaacctctcctcttggcaacattggtcccatcatagtgtaatgagcaacaacccgtggaaagaaatgggctcattcctactttagagatgaggaaaataacactcagagaagcaaagtaacttgcctgaataacagagccatcatttaaggccaggccttctgacaccatccaacccctagttcaccacatcagggtattcttaacctccttaaaattttctgcaaatttgtatgtgtgcatgcacacgtgtgtgttgctggggagaggcccatcacttgcatccgactctcccaggagacaccagcctctcacacgcctctttttcattgccctccctgttgtgggttccatttctctttgggtgaagagggagagatggctttgcgcatggaggcactggttaagatggagcataggagagacacagctgcaaggctcccgaccctaccttaccccatccaccctgctcactgcctgctcagcccactcattcagttgcagggaggccatgctccttccagactgctgagctgcacagggctgggcctccacacttctgtgcttaggaaggatggccttacctacctttctcagtgggtcagcttcaggaaggggttgtgagcaaaggtgatgcttgcccagtgtcctgttgcaacagtgtagcggagcttgggtatgccacaggaataggagcaggattttgcttttctcaagttcagtgtagccagtctgtcactagacctgctgggtccctgcatggtgctgggtaccaggaaagtagacacacacacacacacacacacacacacacacacacacgagtatacaatacagtccctgcccagaaggactgtttattctactgggaaaaggaaatatgaacctattcatgatggagactgtgtaggggaagaaagactagactatgcggtgtagacatacagactagactatgcagtgtagacatatagacaccataaagacatatatagacaggtataaagtgtgatgcctggtgcagggttaaataaagtcaatgcaaaaggggttagaaaggagagcactttacaggttgaaccatctgggaaaggcttcaggagggagacttccctgggcagctccagtctctcctgtgtgccccgggagcacatagctggtgacgtcagtggggacactgaggcctggggagatcgaagcgatggtgctgccttattgactacaggtgcccaatggggcctgcatgttgaaggcaagcttgccaaagtgtctcaccagtccccagagatgaactaacttcctagcaaaaaagcgatgaataactatgaaggagaggaattccccttatgccgagggactttgtcccttctgaagccagagtaaccagccacacctgtgtcaccagctgtgggcctaaattcctcggccagtctcactttctcaccaggagcctccagatttgctgagagtcacctggggtctcccatggatatctggctcactagccaaagcctgtcactcccaggttcccagggagtctgagtgcagtgtctgtggccacctcatggccagaccaggaactgtgacccccttagagtcctgctgtagtggggacacactccatgcgccagccactgcagccttcctgggatgcaggtaccactcagttgccaaggctccctgcagcctgtgtttccatggagggacagaaatcagagaaggctgttgccttggaaaccctgttggcagcagtgactcagctggtctgtagccaccttcagccctccaaacctgcaggcctctggggagatctgagccctgacgagggcaggcctcgtgggacagcagccctccctgcaggcctccacctgcccacccccaggggcgctgaggcgagaacagaaagctgtgtttggagtgtgctaggctggtgcccagcgtgtgcttggagctcagtgcatgcgagagagtcctgaggtgtgttttacccacaggagacactggggaggtggtatcagccattctagtcaagccaagtccccagtgccctcctcccctatggcccaggcgggtgcagaacacagaagactacacgcagttggtgctttcacaggccagcctgtctgcaccaggcagattgatgagttaagagatgtttggatgttccgggcctttctccacctgctcacctgtagccccagcacatcacagttgtggggacagccgggggccgggggaaactttttcttttccttcatgcctgttataccttgcacaccattccccaccccagctccaccatgccccttgcctaccccttgcaccctgacccctaacatgctctagccacagcaaactggcaccacacatgctcctaactctaggcctttgcctgcgccgtgtcagcctgggacatcctcccaaattccctgtgcttggccagctcacctctcaccttcctcctgcccctcgcccaagacagttctagacgctgctccttggggttcctgcaacgatcccttgtccccagcggggcacttgctgctctactgtggggggtgattatcccgccagacaccgagaggggcagttgtgtgcactgtttacacctgggtcccagaccctgtccagagccgggcacagaagtgtttggtgaatggagaaatgagccatcaaatggggcttgggttagccccctgttctcttccacccaggcctttgctggtgtttgcagctagtttctcctcctctgggttccagggcgcctctggccataggacttttatgacaccgatctcgtgctgcccccagtggtgctccggcacccagccctgttagaggagtttaggatttgttctaagggccatccactgtctgagggcaggaaccaaaactgattttttttttggttcacaaggcccaaaacagaagagatgcttggtaaatgtttaaacaatgaactagttactctgaaaggtgagattcgtatgaactctgcagctggaaaatgacccaactcatgggacatctctcaccattcctcagtcaataccagtaataatagtaactgacaatacttactatgcaccggccatgctccagcctctgttctaagtgtttgcctcatttatttaaaactcgccaccacccagagagggaggaactgttaccatcttctcttcaatagatgaagcaactaggagacccagaaattgagtaatttgcatgaggctgggttggctccagaatctgtgtccttaattaatcaccctcctgcctctttgcctaaacaacagcaacaatattagtggtaatgaaagtagtcatagtagtagcaatatatttacttcattatttattttaattttgttattattaccagtatttaccattaaacatatgtgtgtatgtttaagatatatttaatggtaaatacagataataatacatacacaagaaatatacacacacacatttataaacaaacaagctaaacatttatatatatatatatatatatatatatatatatatatatatatatataagctagactatatatgtgtgtatatatgtaccgtttactgtgggctgtcacagttctaagcatctaagcactccagatacattcattaatttaatcctccagccaccttaagatgttagacactattatcctcatttaacaaatgaggaaactcatttgatgaaatgagtacagagaggttaaacaacttgtacagggtccccagttggtaagggatgcagcggggattcaaaccctgggagtctggtttcggaatctgcacccttaaatatgccaaagattcagacctctggccagggagttggggccagcctctctggcccgagggcacgcccactcacagaggacatgaagacaaagcatagactatctgagtgggcttgctggactgacccagagtcaagccaaaaaggaaggaagccctattgggttttctgctagcccctgccagcctatgtgaccttgagaaagttgcttggtgtctctgtccactgatcttctgttcagtgtaatggggcaaggtggatgggctttgacaggagttgtgatgagtaaggagcttagcttctctgcctggaaggagcaaggggaactctggttcctctcccacctccctccaggttggctgttgcattacgggaggacccccccccacacacacacagcttctctagggctgtttcctctaggtgggacagcccctgcagggcttgagggtgggcagcaccaggtatctgctgactgtccctcctctcctgctggccggatgggacaggaggcatgaatgagccatctttccaatgcctttctgtcttttctggtccaggtgtggcaaagggaagctggaagatggggatggcatcaacctgaatgacatcgagaaggtccttccagcctggcaggtaggtgcaggggcaggctctctaacagcccacccccacccctggagtcctgatcctcttcctggacaggacctaaccaaagcactccttctggctgcttgttccagcaaggagtgtaaccgcctgtatggtagtaataggcagggctggctacctgccattctccagggtgtcccattgtgatcgtgtgtgtgacagcctactcggtgatgctgcaggccctgctggcaggcctgatgtgccctagagatgaaatagaccatgccctggcaactcagtgaacttggaagtttttgtcccttggcctgaaacctctctgcaggtgaagtgtcctgtggtgtgttcaggtgggactggcaggcctggaagagattctaatgtggctggggctgtctttaggcttttgaacagtggacttgccctgctggcctccaggtgtctgctatgcttgctcttttttttattgattgggcctctttcctggaatcaggccaggttccaggacaaagaggattcactcagtgaatccaggtctctagatacttatagtgctggacttttggtggaaacagcaggagtctagctgctctcaggagtgtgactgggcctgctgcaggggtgtaaaagcagtggaccttccacagtgactgagtctgccgctgccagtgaccatgacctaccaccacactccactgtgccacccttcccttctctcctgattcttctcctgctattttatctatatccattcatctcttcctggtgcctttgccattttgtttcttctctgttcatgccttgggcctatcaatgagagacaatagagcatacagttaagacctcatctatttgattatgatgtgccttggtgtggtggttttcttcatgtttctcccacttgggatttattgagtttcttggatctgtaggtttatagtttcatcaaatttggaaaattttcagccacgattcctcctactttccctcaaccctggggttccaattgtatgtattctatgcttcttcatcttttcccatggctcaccaaagctctgcctgattttttaaagtctttctttactctctgtgtttcattttggatagcttttattgctatttcttcaagttcactaatattttattccagtgtcaaatctactgttaatcccattcagtatatttttcatttcagacattgtagtttttatctctcgaaggtcattgtgggcttttttaataaatatatatatatatatatatatatatatgtatgtatcttctcttcctcatgctttcttttctgcagcatatagaacctattcccaatagctgttttaagtccttctctactaattctgtcatccatataatctctgagtctatttctattcattgatttttctcttggttatggggcatacctttctttacatgcttggtaatttgatgttaaatgtcatatgttagaacctttacattattgggtgctattttttttgtatcactttaaatattttgggttttgttctggatcacagttaagttacataaaaacagtttgatcctttcaagacttgcttttaggctttgttagggtgggaagactttagtgtagggcaaattttgctccactgctgaatcaatacccttctgagattgccacccaatgctctgtgtattaggaggtgttcccccctggctggagaaacacaaactattttcagccgtatgtgatctcagtggattgttctatctattccttgcctcagaagtttccttacacatggacaaattaatactcagccaaagacttgagaggctaagatttctggatttatctctgtatgttggtctctcctctttagtactctgccttgcaaatcaaattgtcttggactccgtggattttgaaccctgtcatcttagctcattgagaccactgggccctggactgccctccctgtgttgcagactggaaactttccaggcaatgaaccagggcacacatagaggtcacctcattacaaagagaaatatgatgactttatcacggagaaacctggaaggccccaacgtgaccaggtgatcaaggaaacatcattagtgatgggatgggtggacactatgtccttccttccaagaaagcatagcctgagtctggtttttggaaatcagtataaggaccactctctataactgcttggacacaaaagacagggaaagactgaggaagtcttccagattgtagaagacagaagaggcaaatgactaaatacaacttgtgttccttgctgaaatcctgaaccagaaggaaatgctgaccttgctgggacagttggagaatgtgattaggtctgtgggtgggacagtagtgttgcttcgatgtcagtttcctgacttggaggcggtgttggtcatgtgggcgagtgtgcttgactttgagaaatacacactatgatgtttgagggatatgggcctggtgtctgcagcgtctcctcaaatggtttagaaagagattgatgataatggtttgtagacacagaggaagagaaagggcaaacatgcggaggtgttaacagttggggaatctgagtgaggaggacgtggatgttctttgtacagttcttgcactttcctataaatttgacaggaaaaagaatcaatcagtagggccgaggctgtgatgtataagtcacaggcagagtatcagctcatgaaacaccctttgggctggatctatattaaattatcactgctaatggaaagccagccttgacgcaagagaaaaaagggtaaggtactcgaagtgaccaccttatcactccatttctaaatgccaagagcattcatcattgatagaagaagtacatttgagagaccccgatctaggtgagaaaccagatgccccctgcactaggcggggtgttgaccactcggtaccctttgagccagaagcttgggagtcatggctggaaaagtaacagatctgacgctttgtgttgtttggtgactgtttcttcactcctctagggtacaaaatggaggacctttggttcctgctcagacgagaaaggagagctgggctgctggctgggtgggaggttggcggtcaagggcttggtgtctggacccaggcatagtccccatggaatcccagccctgccattgactagcccaggagtctggggctagctacttactcgcactctgcctcagtttcctcctctgtaagatgagggaaataaccatatctactttatggggcgtttgggaagatcaagcacattccttcacttgaggtgctgaggatgatgcccagcgcacagtgggtgctgtgttggtctctgctgtaattattcccgggactcaacaatgccagtgaagccccaccttctgagggtggaccaggctatgggggccccctctgttaagaagaggaaggagggggtgatttcctgctcctacccccaggtgagttgtttcttggtgaagagggcaattctgctgggcaaaagctcagatgatgaaccttggctcataggttaccaaggccctggttgattcttctcctatgcggcctgacaggcagtggagacagattggactagaggtcagaagaatccacttctggatgtctgccagagccgtgtgtgtgacctctcctctgtgggcctcagtttactcatcagcataatgacacagttgtattagatcagaggtttgcaaactgtgaagccctcaggattctcctgggttgcccctgggtgctactggggggaatagggaggcggaagcagccagttctaggggcccccacttgggcccacccagaactgtttggctggtgcctctaaatcaggattctaacgtggtttcatgtaaagaaacaatcctactactaaacaaactttgaacatcatcagaccaaggtcctctgaggtttcacattctagagttttcttttttttctcaagggacggtaaatcagtgagaattccgggctctccagggcccacatgtgatgctaagctcttaggggcggctggtagtggaggccttcacccaccgtctccaccgtcaggctggagcagaagggcttggatattcgtgcgcgcgcacacacactcttacacaccatctatcacacacacgtacacacatacacacaccacacacatcaaacatacacattacatatcatacacctacacatactcactgcacataccacacaccacacatgtacatacacacatatacacatcacacacatcccttcacaccctacacacacatacactacacatgcacacacatacatcacacacatatacacccatatatacacagcacacacacacacacacacacacacaccccacatgtttccatgacacacactttggatgtgctttgccctcagtgaactatcagcagatgaatctgaggccacggtgctggagctcagctgcatgtcggaactgcctgggaagtgctgaaatctacactgtctgcccactgtgttcctcatttactgttgtgtaacaaattgctcaaaacttactggcttaaaacaacaaagagttatgatccacacactttctgggagcagcttagctggtggttcagactcaaggtctctcatgagtttgcactcaagctgatgaccagggatgccgccatcagaaggcacacctgggctggaagaccccctcctgtgtctgaaggcaggaggcttcagttcctccctggctgggggcaggaagcctgggttcctccctggcttccttgccacgatatctgcataagctgcttgagtgccctcagaatatggcagctgtctttccccaaagcaagtggtgacggggggagagagaagactccatcgcagaagtcacactcgtttatagcctgatctcagaagtgacagagcttcacactgccatttgctgtatgtcatttgcacagaccaaccctggtacaatatgggaagggcctacacagaggtgcggatccccaaaggcaggaatcatggggggctcctggaggctggaggacaccctcactgaatcacacccaggaatccatttctttctttttttcttttcttttctttcttccttccttccttccttccttccttccttccttccttccttccttccttccttccttcctttttttttttggagtctctctctggcacccaggctggagtgcagtggcacaatcttggatcattgcaacctccacctcccaggtacaagcgattcttgtgcctcagcctcccaagtagctgggccacaggtgcccaccaccatgcccagctaatttttctatttttagtagagatggggtttcaccatcttggccaggctggtctcgaactcctgacctcaagtgatctgcccacctcagcctcccaaagtgttgggattacaggcatgagccactgtgtccagctagaatctgcatttttaaagcattgtaggaaattctgattatcagcaagagttgaaaacttaaagtcctggctgataatgctcctggcttgactgctccttggagtatctacaattcacatgggtacccttaggacaaggtagacaggcttcttgatccccaaacacagacttttggtgtttgaggaatttgcggtcctgtgagagcacaatgggatgacttatctgagttttcctagtgttcttcaaagcccctcataaatagggctggctggttcactcgtctggccttgggtcctgagggtcagctggcctagctattagcatatgtggtggggacaactcttaatagtatggacgtgtccaatgcaatgtgggatatttaggactcctggcctctgccactgaatggccgtcactggagaggggcaggcatagtgaccaccaaaaacatcctcctacttccagattcacctaggagatattgtgcatccagctgaagacccccaaatgggagggaaagcccacctctagcctgaggacctccagccctcctatgggagtcttgagcctgtacatagataagcgggcttcctagagactttcttagacaaaaatcagggctggcctcccctccctacctggaggcaagaaggaaagagggtgacaaagggaggttggcctcaagcccattgcctacctgccctccacttctgcaccccagaagaagaggggcataaagatcctaccagctgtgtccccagcatgttctcaacccacagaggcccagacccccatctccggccccttctgtccctgttcggactccttagcaggcaggaggctttgtgatgttctcagcacccttgcccagcctctgtcctgggctccccctgccatcctgtggccctgtcagtccctcccctgatctgttctgatcttccatctctccttgctttctcaccagcaggcggttccctctgcctaaaatctcactcagcccttctctgcctgtcctttttctggctcaggatacctcccctgatccctctcagatgcacaggatggagtccagcatccacctgccatttccccagagcccctgcccccatctctgtggcatggctcccaccacgtcgcacctgcttacataactgccagactcccttcctggactctgggctgcctgagggctgggccatttccttcagcctcataaccccagcaccaggtgctctagagtgagtgctgctgaagaacctcctttctagatgtgctgttgtgttgtctagagtgtacaagaaaggcaggatttgtgtctgtcttgacactcagtcgtccctctgtctctgagtttctcccaccacttcccagcagaaattcagcatgaacctggttatgctcttctcggtgtgatttctgagacacattttgttgttgttgttgttaaagaaaacaggatttttccatcatctcctgtattaggacactataggccatggcataatactaaacaaaccccacatctcagtggaatcacacacagaattttatttctaactttctgaaattctgctgagggtccagctggtctccagggtagctccttggggactccagggtccaggtggattgcgttctgtggccctgccatctcaatccatggtatccaagtggccctggcacaggcaaagagagctggagggtcgtgttctaggtcaagcttggccaacctgtggcccaggatggctttgaatatggcccaaaacaaatttttaaactttcttaaaacattatgaggtattttacaattttttgttttagctcatcagctatcattagtgtattttatgtgtggcccaagacagttgtttcggtgtggcccagggaagccaaaagattggacacccctgctgtatgtcttaaatgctttggcccagaaatatcagctccactcagagcccattggacagaactagtcacatgcccccgccccaactgcaagggctgacacttctgcaggggagcgggaagaaggggagcacatggctgttctgtaagcctcaagtgcctctgccaaatcttcctctttccttcacttgctcacttaactcatcttcatggacaagtgctctgccctagccttttagagagagagaattgatcacataagatacagttccccacgagaggcacagcctagtagaggaaatgagacatgcacagattaccacatgcattcaaagctgcaaatgcccgagcaagtgctggtgccttgcccaggtcacagtccctgaagggcaaagtctgggtcctctcccagtacaccccaccttcctcccctgtgctgctgcagctcctgcagtctggggcgtgaatgtgtggctgagtacaaagcagagggcgccatgggcccccacactgaatgcctgttgatctcctgggagccctagcttatctctcagtgggttacacacagagcgcatgccacaatgagtggttttaggaggtgatgcctccactgggggtcagatgctgacacctaggcgtctggccaagctcctctccagccaaagccaaggcccctattcctggtgactccatctggctgtgtttccacaactggcaatgaatccaggggtgagtctcactgcagtgctgacctcaggaacttcatctctggggctgctggactcaggctcttggagcccccacaaggatgtggggcaacagggtagacagtaggtgtctgtgtccagggctcaccctatacctctgtgaacccctgctgccaggaatagttctgcactctgaaaaggcatttagtgagctagttaagtaaagggtctgttggtggtgttaactgtccccaaggtcttccttcccacactggtggctggagggaaaggagcaggtacgctgggataggagctagccaatagccaggttttatggcatccacaccgaggcatgacatgccatacaatggcagcctcaggccagttgagactgacattgctctctaagaacactgatggggtggtggggggtcggcgggggtggagtgggtgggagatggggggcagcagaaggctctgagtacagggccatggattcagggttcaatcatggttctcagtgttgaagccatagggcagggcggacactgagacacacacttgggctcagactgcagttctaggggacccccaaattccatccacaaggctggtgtcctggtagcatttttggcatctctatcacaggagtggaggggttggccaggctaccactctgtcagtgttgtgggcagcccaggcccatcattaacagtcctgctctgagtgtggccccagtgttgaggactgctggagtggaggcctcgccaggatcggtggctgtatggtggtgtgctcccactagagggcaccagcgcaccactctgcaggctccagcctggtgcttgctgtgggaagtcccctggtcccagcgccagcagccaaaggcgtcttcaccggccatgcctcctggtcagcgctgcacatgcacactgtcctgaaaatgaccccactcaatgcccaggcccttcctccctgcagcaagtgggaggatggcgaggtgcaagaggcagccacactaaggtgtagggaagctcctgttgggccacatgtcccctgctaggccaaggcatgacactcctccagagggcccgcccctccctgggacccctgggaacacactgcttccaggagggcagcagcacggggctgcaggggaacacccactggggtggggctgggggagttacaaagtgttggcttccgcccttggaaggatgggggctggctaagtggggagatggagccgcataatctgtaatccatagtctaagccgagttaatttactaagttctgaattaacttgactaagttccaagttaacttgaccaagttccatgtgaaggcaagggatgaaatccgaattgcatatccttcacctcatctctggtctgagaccaccccccggcaccccctcccccaggacccctttactctgaggtgtgacttggggagcaatttctccatgtgtgtgaagtcggcgcgaccagtgtgagaaagacggtctaacgggcatgttgtccctgtgccctagatggcccctaggtgagcattagatttcctcaggttcccgggcacagggccctcggcgccctgcggaaatgccacctccttatatcacacagtggcctggtgcttttgtgtcatatacaataccccattgaaagacgttgtttgttgaattatccagtgtcctgcccagggctttctatcaggacgtattttggtcattatccttgaattctcccagacaaacattatgtctgctgtctttggtctgacagtaggaactacataacccactgacttctcgttttgcctttctcttaggaaattttgaaaccaaattctgtgtctgttggccgttaatcattagatggctcagacctagcagggccggctcccctgcccccacattgctggccttgtccagagcgtgtgactcaggagccctttgctgtgaaaggggcttagtgcccacacaacagtggacgccacccggtcaagtgggatttctggccttagggatgtgcccaaagcattccccattgagggtccccagaaggctcaggggacggaaagtggctttctggcctcctgagcctgtgtccaagtccagccttcacacgggagacggctaaaggaagggacagttccttcctcgttcttctgcttggccctggatgataacagagagatcctccccactacctctctaaagaatccgagggacaaatgagctttcaaaatgaaaatcatggctccatgaaatgacactcaggtgtccctcactcctggaggagtgaaaatggtggccgataaggaatggcctggcagccccagcaggtggcgctgctgctatttagtaatgggggtcctgggcgggaggccggggccgcggctggggctgccccacactggggttgaagcctctgtagccgggttcccagacctccagatgagaaggagtaactttattgttccctagggctgtgttagctgttgccaagtcttctggaaacttctaggacatgctaactcacaggcgtgaggattagtaaagtgccccgagacacccaggagcagagtcctgaaaaccatgccccacctcgcctccccaggccctgtgcaccggcgactgttgctccatgtcacccgtggtcccacggaggtgaggtctgaccttattcacccaggccaacattacggatcaggcatctctctgtgtcccaggcattgtcttatagccattatggactgagtttaagtgcaggggctggtacctgtcccatagacggggacatggtattctcctaatgtccccttagtgagaattcaacaaggagcgtaatgcaccaacagtaacactagcgaacattcacagagtgctttccgtgttccaggaactgagaaggtccttgctttttctaatcttaccctcacgttgtcccatggagcacgtactgttattgacctcactttacagaccgatgtctttggtcggatgtaaccttctcagtaagggcttgtgaacactccatatgcctcctcatcactcaagaatcgtcactcgattcttccctgcagcgcctgtcgcatgtttgctttatttcttttgcgtctgtattctcccagtggagtgtacgttcccctggggcacatctaggggctcattaaatatgggttgagtgacttgctcctgccccagagggactcccacccagcatcttagtccagaacttgtgcctccaccacagaggctaccatgacttgagtgctgtctgagctgcgggctgcatatactatctctgaagtctcacaaataccctgggaaatgtttattctattattatttcacagattggagaactgagctcaaataccttgcctcaaatcacacagctgggagaagggggattggaatccaggcagcctgactcctctggtacctctttctaaggagggacgatgaggaggaagaggtgctggaaaaacattttctaattccaggagacggtagtcacgtacagcaagttaggggtgaatgtcatttccttaataagcaagaacaagaaagtgggtatctctgtttttctctctactgctgaaggcaataaaaatggaaagaaaaaaagagaaaagcctctactgacagctttgaaagagaaatatttttttcttcttttttaatcagacaggtttgtagtggccttccccatccctgctggcccaagacgctgtagcagccatcaaggagggggtcttacaaacgagagcccctttccctccccagccacctccccacccccaagtgcttcctccctcaggacaaaaataggcgcccatacaataaatggggccagaagttctccaatccgtggtttcctgtctgagacctccaggtagcaggtccactgggaaggggcagcgtgctctgtgaggcgagcctatttttattttttgttatttgtgagtcttttttttttttttttaaagaactgattattctggaggtgaagacttttgttggtgacaactgggaaagttcctcgggaagaggccactgtctgcgtctagatggggtttccacgcgggcctcctcctgctcactccatgcggagcagaaggcagggagctgggactgtgggcagcgagtactttcagggctgtgtggggcaggcttcaaggggcctgggcaagtctgcccaccctataggaacacctcaatgatccaggccacggctaggattttagggattggcaaactggtccacagaccaagtccagctctccagcctgtttttgcaaataaagttttatcaaaacgcagccacacccattcacttgcttcctgtctgtgactgcatttgtgccacagccacttgctgtgtggaccctatcgccggcaaagcctaaaatattgactatctggctttttacagaaaaagtttgccaaacactgatctagaatataaacagaacaaaaaaggaaacctctgagagttaaaacaggtggcagaaatcctaaagctcactcactagtcatccaagagcccttctgctttgcacacagaacattgtgtaattcacccaaaataattttcttccagcttccatttcttctgctgtaaagttgggggtcatatacctgttcaacttacgttgcaaagctgtgctaagagtcaaaatacaataaaccagttcatataatgacagggatttttgaacttaaaaaacactctgcagatgtgatgtggcctcatgaagtggtagtcacatctggaagcaggcagagaactggcaagcttggcagataagaactgcgcttggagatggtccaacagcttccttctgtgggtttcttggcgggtgggagatggagggcagggactgttggctttccccagctcctcctgagactgagacctaaagggtgactgtcttcctgcccttgaccttagacagaaaagactgttgggggagtcttctgctcacccatttctctttcctcttatgtccttccctctttcttgctcaaatcttccccctctttcatggccctgttccaatttcacctcctgcatgaaactattctggataaatcagaccacatcagcccacagaggtttcttggttttttgggggtcttgattctaggccaattttgaggttttccccttttttatgcccctccatgcatttgtgcctcctggaggaggtagacctggaactgggccttggggggtggcctgggaggggagagggacctatggggagaaagagaattatggtcaggagaaaaggaggctgttgagagtgggggagtccaggagtcctcgagaggggagactgtatgtagggagagcagttgggggtggccctggacgtcttgggacctgaccaaatagggactcagccgaatgctctccagcaaggaaatgcaggatggaaggaggattcagaagccgtgggacagggcctgactgagcctatgccctcctcctggagaccaagagggagttcccaggatctccctccaggcaccagggaagaagttttgttatttgttagggacaaaggctagagccctttaaaagtaggacttggccccagtggagaggtcatctgtccatgccctactttgggccagaccatatccagaatcccttgatgagtatcagagggcttaatccttcagggagtagggccttgaggccagcatgggacagggagctgggacagtaggctcaaagaaggccagattgaggacagccttcctcaaggtctcagctgggccaaggccatcacacagacaaagagctgctggcctagccctgctggaggaatgagctcagggttgagaagaggccagcaggggtgcccggtacacagtgagcaggccccaggctggcctgagtggccctgtcgacggatgcccagaggcagacccaccctgcacacgtccacccgctttgatgaatggggccacacagcccgcagccttgccgtccctgtccttcagcagtttccagggtctggtttaatcctcccactccctgagccaatttggcgatgcccttgatgacttgggccaggcctggttgattgagattgcttgccggtccagcatcttccctcctctgtcctttgtggaaggagccgccggggcttgggggaagaggaaggtgtcgccaagggtgtgaagcatccattattcctttattagccaatgtcccatttctggtctcattctccttcctggcagcggtgagtttaggggcggagaagcccagttattttagtttccccctgcttctgtcactgggagcagtggtggtggagggggcggggacggacagggctacgtgctctccagcaggcatttgtgaatgggcctcggctcccaggctgacccgccggcaggcggcccccccaggacacactgactcttactggctggaaggcgtttttccagcattgcagcggccaggcaggaggaagctttcctctggcccaagaacaataccagggtcagcccagggacctccctcctacaccctcttccttccattgtgagctgctgcacaatcccaggcccctctgttctatacagccaggggggctggggggtcaggcccaggagagattcacagtgtgtgtgacaccgtcagttgcttgcctccacttcccaggctgggccagggatctggaggcagccgatggccaaacaaaccaagtgagtgagtggccattgggtccctgtcctttgcaaggggctacctccagagtggggcccccagctggatgctaccactctttccctcctttccccattgactcgtagcctgccagggctggaaaagacccagaacttccacctacaaccccattacagacgaggaaactgagagacccagaaaggcaaacttctcattgccttgcttaaaaatccttcactgattctcagggcctatggaaaaccctggactttcctttagcccagggcctgctggcacccccggcttctttcctgtgactccgagtctgtctgtgctctcagcttggtgactgattgccaagcccctgatccagcagcaccagttgccttcagtgtccttcccacctcatccacctgcctgcctgccccacacctggtttttgtttgtttgtttgtttgtttgttttttgagatggtgtttcactcttgtcacccaggctggagtacaatggctcgatcttggctcactgtaacctccgcctcccaggttcaagcaattctcctacctcagcctcccaagtagctaggattacaggcgcgtgccaccacacccggctaatttttatgtctttagtagagatgaggtttcaccatgttggccaggctggtcttgaactcctgagctcaggtgatccacctgcctcggcctcccaaagtgctgggattacaggtgtgagccaccgtgcccagccccacacctgttcttcaaagactctgcttagaggtcacctcctctgtgaagccctccctgataagggacttttccaatgcgttagtttattgattcacctggctcctccagcacttaatatattcctagagcacagctgcccctccacatcactggtacacatgcatgcctcacccacacatgcatctctccctgaaacacacatgatcccgggagccaaaagcgtatcttattcacctctgcagctctttgcacaggtcctcaaagtgtggcccctgatcagcagcagtaatatcacctggggacttgctagaactgcaaagtcttgtgttctatcttcaccccagtgaaccagaaactctgggagaggggcccagtggtctgcattttaacaagccctctgtgatactgatgcgtgcaacagttggagaaccactgccttacgacctacttgcaggccactggcttttcactacttctggatagttcagggagtcactgacatcaccttcccctatccccttctatctgctgctgagatttttggttggttggtttttaccattattttgctcaaatgaaggacaaagaattgtgccctgtttgacaacccaggacatggatttgcaaatggtttggtgattcaaggacaacatggtcccccagactccagcaactgctcctgtcactggtcatgcctcagaggacccctgggtcccgacagccctgggcgggccattggggattagggtttctggaaggctcattccctttgcaccaaagatagaaacctcagcagagtcctcagtgacgctgcgtatttccaggtggtcaaagccaacacctggggtggagatgtgggggcaacccacctggatggggcgaagccctgggctcagtgttccagatctttccttccagcgcactgctttgtgtgtgtggcagatgaaccatccacagcgtgctgggcagaggccgacagggagaggagtttgttccctgcgtgcagaacctctgcagcggcgggcgctgacaccgaagcacactgggtggcaggaggaagcctccctgggaataaagcaacaaacacaaacttctgtctgcaaagagaataatccaaagttgatgttacatcgaccataagtaagaacaacaagggagtagcaggcctagctaaacacgccctggaaaggctacatactgtggttgtgtccagaaaacaattttggactccaggaaccccacagaaaagacgggcctgtcccttggacccctgcttgcagtgagaccactgtccctccgagcatcactggtctcacttccagcagggggcacaagggacaggccatcatttcctgcccccgagcctcaccctcctcctgtgaaataggagtgctggccttgccctccttctggatccaagccttcaccccccttgcccacttttggggtgctcctggaggaaagagctctgattattaaagcattagatgtagtcttgtgttctccaaagaccctctttgttccttttggcaccccacccccaaagggttcaggaggaagctctgcctctagcggtctaggccctgctctctctccagagtgaaaacctcaaggagtgttttcattactcctggggactttggtgttgcttttcgctgtgggtttcctggagtgtgtctcttttggatcccagaggtctgccagcctggccgggatccagggagggtaaatggtggctccttgtctgctgagacaagcgtggcaccactgtggccaccagccctgaaaatttggggcccaggctcccaagctctcatgggggcccagttgcaccatgaggcccagggctgctggccactagttctatgttgagtggccaacatggcctgggctggggttcccctacctgtgaggtgctaaagtgtcaggtgggatggacactgctgtggcgtggtgacattgctaaggtgactattggagcaaatgacctcagtagccacttgcacctcgcatgctttgtggctctgattagatcattcatctccaacgtagtataatgtggggccacaggtgcaggtgggattcagaaaagggaaaatgtaggctggggcgacctcatgccttcatggggaggtgggccccaaacacttgaaccatctactcattttttatcaaaatagtacctgtctgtaacttacaaaaattaaatgatactgaaaggcctgtgacagaaaatagcagctttctaccccctgcgtcctcaagtgacccgttccattcctcaaagcaactacataccttcactgtttttactatttttttctagtggtaccaccctatttcgaatacagatatctaatctctaatatttctaatatctagtatactattattatactgttctttttaagtatatcaattctagtgatttcctgctgattttcttattatgagagagaagaattttgttctcctatactctgtcctctcaatataggtataccgaattttacttaaatgtttaatcagatgattacttcattaacgaatcctgctttccttttctttattttgcaaaaattcagattcacaggaaagttgcaaaaataacacaaagaattcctatatagccttcacccagattccccaagtgttcactttttaccatactcgctttatcattctccctatgtaattttattattttcttaattccttgaagagtaagttgcagacacagtgccactttacacctagatacttcagcatgttttcctaaaagcatggacattcttttccataaatgcaatctaattgtcatatcaggaaattagcattgacagaatactgttacataacctgtagacatttacattttgttaattgtcccactaatgttcttgatagctaaagaaaaagtttttgtttttttgtttgtttgtatttttttttttttttttggtttagaacctatacaagatcagactttgcttttagttgtcatatctctttatctcctcaatctttctttgtcttttatgaccttgacattttgaatagtacaagcaggccagttattgtgtagaatgtctgtcaatttgattttgtttgatgtttcttcataattgagtttgtgtactttttttttttcttgagatggagttttgctcttgtcacccaggctggagtgcaatggtgcgacctcggctcactgcaacctccgcctcccgggttcaagtgattctcatgcctcagcctcctgagtagctgggattacaggcacatgccaccacgcccggctaatttttctatttttggtagagacggggtttcaccatgttagccaggctggtcttgaattcctgacatcagatgatccgcctgcctcgacctcccaaagtgctggcattacaggcatgagccaccactctcggctgagtatgtgcactttttaagggaataccacagaaatggcgctgtgtccctcttcgtgcagctcatggagaggcacagggatttcgtgatgttgacattgaccaactggttaagatagtagcttccaggcctcactgctatgaagttactatttttctttttttaatttttttgagacagagtcatgctctgttgcccaggctgaagtggagtggtgcgatctcaagtcactgcaacctctgcctcctgggttcaagtgattctcctgcctcagcctcccaagtagctgggattacaggtgcctgccaccacgcctggctaatttttgtatttttagtagagatggggtttcactgtgttggccgggctgatctcaagctcctgacctcaggtgatacacccacctcggcctcccaaagtgctagaattacaggcatgagccactgtgccccggccccaagttactatttttctctttgtaattaataagtatcttgcaaggagatagttgagactatgtaaatatactgtttctgctaatactttcactcacaaattttagcattccttaatgattcgtgcctgaaatgtcatcatgctgatcagcaaatagtggttttaaaaaattccatctacatttattagttggctttctgctataaagatctttccttctctatttttcttttatctgtttatttatatatgttttggctcatagatttttattttattctaagggttataatccattactattatttattttgatgctcaaatcatcccagtgggagcccttgcaaactggcttctgtgtgtttctaaaatgtccccattattctttgagcacttcttgactttcaggcatgagaacttgttctgggcttatctggtattttctctgccccagccctggaatctagtgttatctaaggagccctggtaccttttaatgaatggttcttagaagccaagatcgggacctaggtgtgctcattgctgctcggttctcacgtttttttactctctcctccctcattccttgagtgcctgggttctcaggtcacagcttctgttattctgcttctccagaaataaactttgaatcttttgcctggtggtggggaccaaagtgtagtttcctggctatgtggaaagggaaggggacttggggagtctcatatttagacttcgatctggttctgctgtttcctgccaacacctgagccttgcctctcctggtacctggggcctgcaagctttgagtcctcggagatttgcagcctccatccatgcatttctcatcagtattcctctctgcacataacttaggttgcacctgtccccacactgccaagttgcccactcctccttcgtttactttctgtctttgcaaagtttgttgaaatctcttttcttgatctctgtgcttatgggggtttacaagtttttgtattcatgagagagcaggagttgaattaaatgcatgtggtcaatcctgtcgagtcagaagtctaatttgtttggatttaaatagttagggaaacaggaagaaggtcggaagactgagctctgtgtgcttgtcaagaggagcaacgggagcagatggtgtcgtgtgggagtcggggataaagcgatctgtcttcagagttcaggcaggagaactggcttgtggctgagccctggacaggttgtatagagaggataaagggggtgcaggatgtacctgaatgccagtacatagatttttttctttgctgttgttcaaagaactctaggaggggacacacacacacacacacacacacacacacacacacacacacacaccaagcttaccaaccaggagatgggcagagtgagcagagtataagccccagtcgtctgaggggcctgggaaaatctctgcttggattcagaccttacaaagattcagaccctacacaagagccaccagggcaaaagtgctctgggactcaaggataaggctctattgtcctcccctgcttaggattccagccacaccctgcctagctttgtatttgccccttcctggtgggaaagactcttcctcagcaagcctccagagccctgggagcagggctcttgtccgacaccacctctgagacagcactggtacgctgttggagctccatcaatcacagaaccagagaatcgttgctgaaattgccagagcaaatgtgaagccgactgtgtgcaaaggtgagcctgaaagcagcctcttcaaattgcccttaagaacttgtaaggcaccaggtagttgctggcacctctgtctctgcagccgcctgagtcccgctgtcctttgccgttactaagaaatgtggcccccacccccagtggtagcccagtcccagaaggtctcatataaagtacaagctgtccttgccttttgccaattcacatttcaacaatccacgcattctgcagttcctgaaaaccgcttgtgtagaacttctggtagctttaatctccttacttgggagttcctgctcatttctggaaatgtttaaataagcaagtctacccttaaggaaagtcaagacagcttttccagtataatacattgcatcttagtgataaagaggtagaaacctcagagcttagtctggttgaggcaaggccagtctgtgcacggttttgtcagctgctcctcctctcaagaacactaaggcctgaagggcaagggctctgggtgcatccttattacctggaagtgctccttttccagcagatcacctgcaaggattcctcctaccgacatgttgtcacctcagcccctgatgtggaggataaagctgggtatacttgcgatggggctggtgaagaagagagggtcagatgagggcaggctcaggtataggggtgccaaggatgggtacctagaccagccagagagaacacagaagacttagctgtctcaccatggtgcccagagtaaggaacagccagcattggatggaggaacaaagagatgaaatgtcctctgtgcatgtatcttgaaaagcacctagtcaccattctaaaccatcctaaacacgtccttctaaacaaggaaggcaaggctcccagtggggaagtgctgggccagaggccacacagctcactcagccactgacttggggcccagggtcccttggtcgctggtcttcccacacatcctgtagtttcttttataatgaatccgaatgattggtccttgtacaaggctcacaggacatctgtttaataatgtattctagaatttcctagagatcagcatcaagtaggtgtctttgaaaaggcttcatcactaaagcatctgcacagaaaatgttctgtagagaggaaagagggggagaaaaagaaaggaatgacaatcagagctgcctctctgtctctgcacacactcccctctctcatccaagtgagaactgcaagaccacataagctgctaatggccgaggttcccggggccccactcctcagccccgccatgccggggcacagagaggtgggggcacagagaggtgagggctcttccgaaagatgcggtggtgtttgggggccttcagacacaccctggaggaggaggactgccacagcatctgggcatcccgcactggcagttgtaccctgtcctcattgttctctgttctgcatactgggctgtgtgtcaggcctgtggcttcctttttcatccctgaaggaggccactagccacatggcgactttttgcaaattagaaagaggtgccccttcctcagcacagcctctgtctgatattgtcataaaaataactcaaatctatgaggacagagtggccgagtcacctcctggggttgttcaaagcatgcagaagcagcagcccgctctcattttaagtggatttcacatgctgcagcttgaattgaaggcttgggtcactaagtcattttctagaaggccaaactttgagttgagaacctttcagctacagagaaccctccgctgaagggtaatgtctaacagccaagaaggcaagtttcctccattctatttcttcaggaggatggagtcacgaggtcataggagggcccacctgaaaggagccttcatggttgtccatataacacagcccctttcagtctgcactgagccaaactcaagccccaggccagcgcagatgagctgaattctcaaggttgttgtgagtcagaggtcactgtacacaggagagagattcctgctgtccaggaggggctaagtgcaaaggtgactttcagggaagaaaaggtcactaccttcccctgccgcagttaactctctgggcaatgggtcctgggcatgaggcacttgtaaagctccccgagtgaatctggcttgcagtcatggctgagcccctctgccctaaggtattaaagacttatcccatttccccagtctgtgagatacttacatcatagaaaaataagcagttagccaggacttgatcctaacttataaaacattagttcagtagcttctgtcatcttgaaattgatcatgcccagccttattttctccctgtcctataagaaggtaggattcctcagagcagggctcatgtcttctttgccattgtgtttcttataggtgacactctctcccccatctccaccccaccccgtccttcaccaaaactcatcaatttcattctaaattttattttatttgggcgtttacagactctccttccatccactatggcttccctaactcctccgctagtcctccttgccccttggctgttgtgacagccccttaccagtctgccctgggtttggtttaaatcccctaaatccagtcacctctagcatgacctacaaagtgcacacatctagctagtttcctgatttgctccagcctgtccttgccttccatcacgtggaagacaagctcctctcatgcacggtcatcccaatccagcccctgcatttccttccaaccctgcatcccacattttccctatcttgcaccccatgtaacagcacactggactagctgtggagccctgagtacagaagggccaggtctgtcttctcctggctgatccatcatgacctggctcggggattggctgtggaaagtagtccacaaacacttaaggaacactctctcagcagccctggcgcaccctgcaacacgcacaggacccagaaggcatcctcccagagccggaacacaggagcctgccccgctccacctcttccaagctgcatggacttgaccaagcacctttacttccccatttcctcctatctaggatggagataataaaacctcctccctgcaaaccaccatctcagaaggctgtagtgagaatcaagcaagacaataatggagaaacttctttgaaaacagtgaggtgccagtcaaatctaagggcttctgagagggcagcagtaaataggtattgcacacggcagctcctggggcccactgggagccactcaccacgagcatggtgcacgtgcctgtgagcagggcagacagagtggctgcaacacaggcttcttccttcggtatttttataaagggaatcgggtgaaggaaatgtcttggaatagacaatcttcctaaactcccccaaaataacttcagtggaaacaattgtaacgtccactctgccggcattgtttcagtccactgtagtatgggaaaagtctcccggcatttccaactcaactgggaatccacttgacttccagacgtctagaaacaaagggattgtgcccaagggccactctgggtgttcgtggccctctggtgccgaagacaattccagggcctgtgtatagcttactcttcctctctccctccctttgggagacatatttgctgaagggctttgtattttcccatacataactttgtaggggtcgttaccaaaatagtttgttagaatacacttgagattctagatttccctccagtcagtcacacagcccagtgttccagattcgaggcctcccaatgctcagtgactctttgccacctgcaccagatagaatcagtcctctcctaaaaggtctttccttcttcctttctctagctgggaacaggtgctcatgtccccagtccttgtctggtcttcctgtctccccactccttctcttgtgagtctgtcctcctcaaagaaattgtccaagcatctttgctcactcctgtctcccctttccctctccctcccagacccaagtggtgacaccagctctcccctggcctgagacagatctgaagccctggaatgtttcttcactccctcatctattcttatcctccaccgcccctcacttgctgccccaggtattccaggacaatcctatttacctgccattttatccttttcttctttttgagacagagtctcactctgtcacccaggctagagcacagtggtgtgatttcggctcacggcaacgtctgtctcccgggttcaagcaattcttgtgcttcagcctcccgagtagctggattacaggcgtgtgccaccatgcccagctaatttgtatatcttttagtagagatggggttttgccatgttggccaggttggtctcaaactcctgacctcagattttatccttttcaaaaacctgagcttgttaattgtctcactaaatgagacttaagtttttatctttgtaaaacaaaacaaaaaacccttgctcaactcaactgggaatccacttgacttctggaggtctggaaacaaagggattgtgcccaagggccactctgggtgttcatgggccacaaaaaaacaaaaacaaaaacaaaacaaaaaacaaaaaacaaaaaaaaaaaaccacccttactcctatttctggctcaccatacacgaagatcagtttccttcttgcctggatcttgtcctctccacctctctgcctctaattctcccatccatcaaaatctctctcacttccccctctttgtaagaagtgtttcctaaccattctgctgggacattctagaatctttgctttctcagaacatggtaccctgcctcattacttctcaaactttagcgtgcatatgaatagcatgcagatctggtgaacatgcagcttctgattcaggaggactagggtaggcctgaacttctgcatctccagccagctcccaggtgagaccaacgcggctggtcctcagaccacactttgagtagcggaaccctacaacaatggttcccacattttgctgcacaatgggctcctgtggaggggtgggttgaaagagactggtgctagtcttccatccctagacactctgatgtttttagcatggagcttgacccaggcattgggattttaaaatctcctcaggtcattatactgtgcagtgtgggaaccactgccttattgcataaagtgaatatggctaagcctattattatttcatctgtgcttaccttgtctcgaccttgatagactacagccctctctaaggcaggacttggtcaacattttgttttgagcattgatagatgaaccaactgattagatattaggcccttacgtgcttttctgatgatgaatcggtgttaatgagcatatatgtgttgccacagagaaatgtactagatatcaagagggaaataaaaatggatcttggcagaccatggtgaaatctacccggtgccagcatcagcggagggtggcccaggctgtcctgtgtggcaggctccaagggctctgggcatgtttttggccctttcccacccacaagaggaaaaagaaattctacctctctggcctgcttgttctaaaaatactcactttttctccttttagtctgaggcagtggttctcgaccacgttgtagactcgcctggggagcttttaacatctttgatgcccaggctgcacccagaccaaatgcatgagagtctctggagtgggacctgggcatcgagatgttttaaatgtccccaggggctgtcactgagcaaccagggctgagagccaccaacctcaggtaaatgtaacccctttatcctcatctcaggtggactgaatttgtcaggtccttctatgaaggagtggggagagagtgtgagaaggctgggtacctatccaaggcagaaaaccagcacccagtagagagaagggcccagagagggaagacactgctgccaaatgcgccaggtctccaacatgtctccagtgcaagggtctatcggccatgatccacgcgccaagtccagccctccattggtttttataaataaagctttattggaacacagccacacttctgtagctgtttttgccatacagctgcagagctgagtcattgtgacaaagaccttatggcctgcaaagcctaaaatatttagtatttgactctttacaggaaatctgctgatccctgctctagagggttgaccctgcatagactccctaactgcagtttatgcgttggtgcctatgcggggaatttttaaaaccacattttggactttgtgtaaatttttagttgctcttaaaacagagcagtgtcctggtggctgtgctgacaataagtcctggttggcttccctcactcagctgttggggtggcaggtgctgctgctcccaccctctggtcccaaagactctctttggttgccctagggtgcccggcagatgttactgttttctctgcaggctgtgagtcgggggcttgggaagccccatatcaaaacctagtagatgtaagaagttagacactctggctaggaatggacgctattcctgcccaaggacaatggattcaggtgaggagggctgcaggaggcagaggctctggagacagagagcagggaggggatgagagctgccctcagtcagagccacaggaaccctggcagtggaggatggccaggaagcgcctaaagactgagcttcaatatcctgagtccaggttctcaaattctccgccattccttcttgagccaccgctgtgcccctgaaagtaggtcagatcactgtctgctacagagccatggtgggaatgagataccaactacgtcagcagggccactattgcttagtgagcctgctggccagaaccaatggctgcccaatttaagacaacccataaagacctttttatgtggtgcagactctttaatgccgtgcatccacacaacaaaagcttagcactgctttctgggaatggaacaagtaattgaatttctgaaatgataaatttcactatagtcagagagaatggtacaaccagtctccttaaagcatctggattctcttgtaaaattaacaagttggagtcgattgtctaatttactaaagatatttggaacaggacttacaatttcctagtatgcttaaaatacagttccacacagagatttttctgcatgcaagcagctttttaggaactcatctttgtccatctaatctttcttcctaattggaaacctctgtaagaccttatcctttgtcatttctgcaagttcctcatgctttttaaatttttgaccacacacttgtcagggagatctattatcttcttctggtactgatcagattcacatgaagcagcacagctattttggaagcacagcacagaatttggaagaagggagagggaagaagtgaggtgctctggcacaacccagttacagcaaccttgtaaatgtatgcattcagtgctggaattgtttacagagcgagtgcccaccacaattggggctaaccctttctgtagcttgtttaaagccacattcattattcattcattcatttgttcactccatcaatcagcatttgttgagtacctgctatgtgacattgctgtgcagagtcattataatgggatctgggggtctattgccagagaaagggaacccacgcacacacttctggatgggcactcgctgccgtcagtgctgggtctcatgactgatgctcttatgagcattccgctacggttcaatcctgagcctcatgggaataggctttgatgttagagaactgaggtgccaccctagttccattgcttacttgctgcatttctttagacatgctgtttagtctatccagccctccttttcctcatttgtagagaatagataatcgtagtacctatatctcagggctattgtgaggtttaaattagttactgtatcagaaacttttcactcagtgcctgcctccatacattacagcccgttgctatcattatgatagctcataatccatgtagacatcatttggctccttctatggcgaggagactttctgaacaccttccaggaaactggcattgctcagtcaggagaagagcgcgtatttatcgggcaggactggaggggaaggaaagagttcgcagggaacttcctgccattgttgggctgtctcctccgcatgtgactcggctcaaagatgcccaagcctggtcttgctgtctcctttttctttatgttcttgccactctgaggtatcctaggaggagctagtagaaccttttgaaaacagccaaggagtgtcacagatctggcaggtttcgtgcaaaggcccaagccgcctcccacagatattccccctctccacttcttccccagctgtcagtctcattagcatctgcaacgtgtaagatgcaattctggaggtgaagcttagggctctggcatggggcggggggcttaggagtccctggagtcccctagtctttgcctaggctatgggcccagctgtgatccagagtttactttcacctccagccctttcacatcagtagacagcacaaatctagggcagcgagcctgtgtcttctataacccagtagaggccattggatgggacccccctgttggtgctgactggggtcacagtttgggctggcctacctccttggaccctgctgcccatccatcgcagggtggaactcctggtctcaccgtcccggcctgtgttactttgtgtgacccccgccagacatattgctctctttatgggtaccgacaccgctcttagtctgtctggcttgagctctcgggacctagggtccacttggacccttctctttgcaagctgatctggcttgagcatttcccatttgggttcagcaaacatgtaatccagaactggccaggtgtgtttctatctgtcatctcctttggttttcagcatctcatttaattcctacaacgaaaggtaggtattagtctctccattttcaggcagaggaaactgaagcttagagaggataaatgagcagcatgggtgcctggccaatgtacctgctgccttgctgtctcagaagtgagacacttgttacacacagggggcctgtggagctaagtagtgggcctaagcatctgtggtgtgttgtcaccatgcagccagtgaatggccacctttgtcctcggagagcttacagtttcactgagtcctgggggacccaggtctttgttaccttttccctttaactgaaggagagctagcaatcactaagcactgagccttatggttagaggacatcaaggatcctggcctcttgcagagcaagagatattgcctagttaaaggccacagacccctgggcctctgggccaccaatgaatgctcttggtccacagtggatccagtaagaatggcccaactctggcctgtcaggacagtggtcatcttaactttttatacaacaaacaattatggaggctcatggtatctaaggcactgtgccagacactgtggggcctacagaagtgaaggaagcatggctcctgagctcctgaaagtttgtagcttgtttggggaggcaagcatttaagtaactatctagaccattcagacagcaggatggagtactaggaagtttgtccagtgtgctgtgtgaccagatggattccttctcatgggaactgggatcagctttgcatggcaggggcatttgtgctaatggtaaaagctgacagaattttaggggtaaacagaagtgggaagatgttccaggctgaagacaaagcctggaaggaggagtgtgtgttcagggatggcatggcaggtgcacagggaaagggaggcccagatggtccttaaagatcagtggctgaccattctccagtctaactccaaatgccagggcaggaacccgggtatcctggcccccagcccagtgctccttctgctgcattgctgtaaatagaagtttaaagtggttctcaaggccagaggggattggggagcaatccatttgctgaagcttttcctctggatgggcttctcctgagagatgacatgtgagggggtagtgagaatctaagggatcacctcctcctgataagccagaaagcacctccactgttgggaggctgtgatgcagccagaaatagtgatcctgccgttgcatcctagcccttgagtccatcaccccagccctgcagtcctgcagtcctgaagcacaggatctgatcccctgagcctggctcatgcactctggccttccaggtcaagcgtggggtatgaccagagccaggaaccatgtggcactgcagggcaactctctactcctccctcctgaaagtcaactcagtggaaaatgtagccatcattaaaaaaaaaaaaaaaaaaaaaaaaaaaaaaaaaaaaggcaaactcccctctgaaaaccctatggatgaagggagcacttgaagggaacaccaagtacacaaggagaaaatgacaaaatgctgctttcctggcctctgctgctgggcagctgggtgattcagctgcaggggctgccctcctggaacctgtcgcaggagatgccccggctgcatgccaagctaggagggcccagcagctggcatgggactcgcttccatcctggggaggcaactatgtatttatcttattttcagagactgagtctccttgtgttgccccggctggtctcgaactcctgggttccagtgattctcctacctcggcctcccaaagtgctgggattacaggcatgagccactgtgtacagcccaattctccatttttaaatttactggtttatgaaatttgaaatgttgggcaccactaatttaggtctacgactttatttaaagaaactctaagcttcacatattaaagactaaacagaataggaataccctatttgttttctctcagccttgaatctttcccgatcttttcaacctggtcattctggtctggctcacctgtccctttcttagggaggactcttctgatgccctaatctaaagcattatccccttcctatggtttggtttggttttgagcacacttgtttctgtttgaatgaccttggtgtttttagctgcaggctggggactgtcatttccccttggtagagtggaagttcctctctgtggcctaggtcactgtggcatccccagcacctagtacagccgctggcaccacataagcctcagcagaaatgtgttgcctgaatgaatgaaaccacggattggcttcctggacgaggacccacgtttcaaccctctgtccctccagcaccaaggctgagctgcccctgctggttctcggtcagacctgaggagagaggtcctctcttccccactcttcttatctgtgctgtggctagcttcttagatacccccgagcctcctggtgcccgacggccccagcaggctagtcagacccagtgtctcagtcgagtttcttggctgccgaggcctgaaatcttcagggcctttgagtaacattctgcccttgagcaggttcacagactggctggtcctctgggagacaggcccctccctggctcttcagagcctccttgcagcttcccctcttctagctctctgccttgcccagagtcctgtgatgagatgaggggagggattgggaagtgccagcatggggctggggctggggctggggctggggctggggctggggctggggctggagccgggtggtgcaggtctgtgtggaggaagctgaggttgcagggactgctttggcccaagagtgtcctggacacggcctgggagcttagcaggtggttagttgattaacacaggtatgaccacattctaggatggttttggggtttgggcggctgcttcccagcaggtgcacaaagaccacagacgcaagtgcttacgaagcctcaggttggaggccttcctagcccaggggtctccacatgcagcggggcattcttgagctgggctgtcgacatgccattcatgcccagtcatctcatttaaccctcgtaacggtcctctgatatgcgtatgcttctttattaccaccattttttaggtgagaaaactagaagcttaaataaggtaggcattgctgccagctcctgcggtaagtggcagtgacagcatctagccaaaacgtttgatgcctgatctctgctcagggcacctggatctgcattgctgcagtcccccagctctccaattccacgtgagcacactccacactggctcggcagatactgagaggcaggtcctgctgctctcgccttcactgtggcctccttatccatgctgatatggcttggctgtgtccccacccagatttcactttgaattataataattgccacgtgtcaagggctgggccaggtggggataattgaagggagatggtttcctccatgctgttctcatggtagtgagtaagtttcatgagatgtgatggttttataaaggggagttcccctgtacatgctctctttctgctaccatgtaagatgtgactttgttcgtcctttgccttctgccataattgtgaggcctccccagccatgtggaactgtgagtccattaaacctctttcctttataaattacccagtctcaagtatgtccctattagcagtgtgagaacaggctaatacacatgcctgtggcctctccagccagctgtgacctaccagggcagacagcaggacagtgatgaacctgttcattcatgtgaggccttggaggcttccccccggcacagcggggtacacctcagaatcttagcatggctgcgcaggtggtttaggcaggggctccctccctgctacccacagatgcccctgccctgtgcgaacgtgactactgctagtttgtataatgagctgcagcagagtgtgctcagaagaagcagagcagagcccctcaagcgtgggccgtgcctctctcactctaacctcagagcctctgttcacttcgaagggtgacctcaggcatcccttcctccacagctccttggaccttggatgttcttccattgtgactccactcaatttgcgtgtccctcttccccagggcccatgcccctcttggagacagaggtggagtcttgttttcctgtgtctgtgcacacagcatgctcacagggcaccgtgggcatcctctgagggtttgttgagcatcactcctcttctagagttggttgatgcttcagttctatgatggtctttgaacctcctcaagtacataaaactcttcacaatgttgcccacttctcaacagttgtcatttcccccttagaggccagaacgcaaacattgctttgccttctcttgagcttgctctctagagttcttgaggctctgggtcttatctgtgccatagacacaccacttcatgaggggccaggacacaggccatatgtgtctcatcatgcccaggtggttttttcaggggctgcagaatggaaactctcattcctcatggccctttgtacctctcacatttcttgggcgtctttctgcccctggtctgcagcagcttgaaggcattgccattttcagttcagaagtgtgtccaggacccttaatagatatccattatccagggaatggagcatgtcagtccactccagttccattctcttgtgcgtgtcccgtgtcaatgagcagcatgaacaccatgagcctaagtggcctgtgttcaagtctttcctgggttcatgacctggagaaggcccgtagccttttggtcccatttggtcttcgacacagagagtcacagtcatcctccagtgcctccgtcccccagccacactgggggccccccagcccccagtgcacacagtgcactcccttcagtgcactgtgctggctgcagaatggaagcctgacaatggtagttgaagaagtggcattttactaattgtttcctgtacattttaccctctataatgtagaaacaatcttctaacacttccctgttggtccctagtccctgttctttgcatcagtgtcctcacctattttatctgtttattcagaaattaataagtaaatgtcatttgtatttgacattgcctggtagattcctcctgacatggctacccgtggagggcaataagggaggggccatgtctgctttccatgacttcctggatataataagatcagccccactgactcctaaagttgtatcatgttaaattatttaggacttttttggttgcaagcgacagaaacccaactcaaagtattttaaacgtaaaaagaatttgttggctcatgaaatcaaagaaagtcttaatagtgtggcaaaggaggtaggaagagcaaatattttcatcctcattttacacaagagagaggagagggcagaatgggatattaaaagaatggtccatggtgatccaggcttagcgacagctaggatccgggtcacccaaagggtgtgtgcagtttattattcaggactctttagactgttacaataagaaaccctgttggaaggaaaagggagagaggggtggttattcccttggagcatccaaggaagtcttgcccattccagcgacccagcctctggaaccgcagtgctgtgcagatgaaaaccatctggatatagggtgcatgtcataggctctcacccacaaggctaccctgcgcaaaatattcacgtgcacttttaagggggtcgtggaatccactgaaacctgtccggggttcctgagtgaagcccttcttctagaaaaatgtctagctcattgtgtagctagcctctgggatagtattgagagcagagcttttcagaatgggtagagttttaggttcacgccacagggcaccaatgtgtggcaggtggaggcaggatgtgtggggtgccagggctcagcggcagcttccagaaattccatgtttacttttattgtctatgattttatattagaacttcagctaaggtattgtttttaaaaggatctctgctgattaaaaaataataaattaaaagttagaaaaccacaaatttaagcatgggtgagcctgcccacccccgactttcctttctgaatcaggtcaacttctctgaatagctgtgcagcctagagattccaggaattttagaaacattacctatttatttctgcttggacgtgacccacacatcctgcccacgtggagagagaccttggtaggataacttcttagaaaaaaaaaaacatgaaaaaccatgacccccagcaggaggaagcctctgctgttaagacaagcttattgtcagaggagctgtgcttgggatttttatggtcctttaatcaagtgctgtggttcctttgtattgttcaccccttgggatgtctacccaggttggggctagagatgatgggagtctgcaagtcctgagctagcagggtctggacttggcctgaggatctgccctacctccatggggctcatgctctctgggtatgcccagggagtgacagaaacctgatgtaatcaatatagaagcttgtgaagaagagggggactgtagcttccaagaggccagggcagagtggatatccaggcactgtgggggcagacaggtgatcagctgggagggagcagggttggagctgcaaggtgtgcctggtgaggagcccggtgtggccacctcctgcctgggacctcccaccccttccctggcctgggctaggatccccaccactgcacggctgcaccacttccttgcaaagacaagcatttagtgtagttgtttttaacaaagcaggaggaagactttcttgtgtctgtataatgctttcttccttttcaaaaagctgctgtatgggagagagagagataatagacctagagatagttaggcttggatgatttctatcagacctaggttcgtggtcaggggtcagaggtcaaagatcatgagactgtcaggaagattttccttgaaggttaagtgggcattggattctatgaaagtgcaggccatggaattgagctctgcggggcacttcaaaacctcattggggcaggggcagcagcccggggactccccctccaccaccaccaccaccactccagcctgtggagtgaagggcagggtgggcttggtggccaggaatacccctttctggagaggagaagggaggcgagcaggtgagcctgccaaaagggctgtggccagggtcatctctggggttacagcaaggatatgccaggcagacacaggaggctgtctgaaccagtgcctgccagacgccagctctcccacttctgggcctggggggaagcgtagtggtcactgggagggactgcctgtctctgagtacagaaatgagggagggacttgctcttgtccactccctcttgcttctagaggcctggggagcatggcggagcaccacggggtctatggtagggtgggagagagctctctgatgctcctggggggttggcctcccatctctgccctggtaccgtaggccatgtcacatcaccattgggaccatgtgcctcagagatggaagacacaggcttcctgctaactggttgggcctctgtgggcaacttctttgacctcactaagccttctcttcctcttccataaaaatgggctggatatacagtggaattacctggtgagcattcaacatatacaaattcaaatctcaaattcaaattcaaaatttggcaaaggaaatatactcagaaaaatatccctcccagcctgggtgattttgcccaccactccacctgggttagtttcccggggccgccataacaaaggaccgcaaactgggtgacttagaacggaaacttcttggctcactgttctgaaagcagaattcccacatcaaggtgtcggcagggccacacccgccctaagatgctagggaaggaccatcgctcccttccagcttctagtagcccctcagcttcttgcagtgtccccccagtcctcacgcggccttgtttttacaaggacatcagtcatatcggaccggggccccacacatgcacattccaatgtgtcctcatcctaacttaattacacctgcagtagccctctttcccaatcaggccattcagaggaaccaggggttaagacttcagcgtaagaatttggagatcacacttcaacccatgacatcatccagaggacccttggttggggaaggaggaagcatgggagagaggcacaggcccctcagggtgggcacatctcggccccatgtgaggactgggtagagacaacaacttttacaccagaggcccctaagtgcatgctgaccacctcggctggcaggcagtggtggagacaagagccttttccagcctctgaaggaattggtctatgctggacaactggtaactccactgtggtctccagggaagcaggttcatccttcagggagggtggggtaatgggtgtccacgggcacagcctgacccattgctgacggcaacagcagtgcatcatctcacagtctagaggtgttggccgggctgcgctccttcttccaaggctctaggggaggagccttctgcacttcttcccagcttcccgtggctgccagcaatccttggcactcctgggcttgtgtctgcctcactccaaacactgcctccgtcttcacatggccttcatccctctgtgtctcctccatctttctgtgttcaagtttacttctcctataaggacacccatcgttggatttagggcccaactaaatcccacaggacttacttcatcataacttgattatatcttcaaagattctattttcaaataaagtcacattcacaggtgcacggggttaggactccaaccagtctttctggggaacacaattctacctcctgcggagggtgaggaggactttacagatgggatcacaccaggactttacagatggggtcacactgtggtcagcatcaccagcaacggtcctcggaatgccagggcttcacctctgcccaggggcccagcccaactcccggcactcagcccatgatgctgctgccatcggcctgccgggttgaggttgtggcatgccctcttctcctctcttgtgccttgtcaaatgccttagagctccactcaactatcacccacctggcagaaccttccctgactcttctcccaagaagtcctcggtccttcctatgggccgccagaggcgcccgttcaacttcaactatcgcacatggcacatatcagcttctttgtttgtgttcccttgagttcccctaggcctgggacagagtcttattctcctgatattctccatcaggtgcactgttgcatggcgggccccctacatttgtcgagtgagagagagacaagggtggatggatgggggcatgggtaggtagatggacgtcaagtgttacctgaacagagaggtcttccctgacccctccacccgtccctctctcatccccttgccctgttgtgttttgctccatagcaaaacatagtcctttatcatatgatatactttgttgcctctctcctttcattagaatatgtgctctgtaagaacaagcatattgcctttctatttcagtattgtatccacagtgcctgaaacaacaatatttatgagattgcaggtgcatggagggatgggtggatggaggcatagacgggtgggtggctgggagcctgttgcctaggggaggtgtgtcactcctatcacagtgtcagctggtcacagagccacccggcacaatgctttctgctcactgtttgttttgccctccctccccatcccctcacccccagattcaagaattattatttttttatggctgtcatcacagggcaaggcctcgcactctctgcctaggattattaactatctggggctcatgttctggggccagagctctgctgggcctgcccttaatccctcagaaatacccaccacactgggttgtgagataccagcctcagcctgccctggagtgggctgattttacataacatgtttttgcaaccagagcaataacatgccgcccctcagtgtcatgtcttctgcaagcactgacctcaggacaggagtgtatgtgcacgtgtgtgttccacgtgtactctgccggcgctgcatgtggaaggagtattagcttccctccatccctggagaggcttggtttatataatctacttgtctctcaggcccatttagttaccggaagtggtcagatgttagacagacagggaactgcagccaggtctcagagctcaggggagaatggttctcatgcagagaggttggggaaaagcaggcagggcctggtgggtagtcccagtgtgctacagaggcacatctgactcaggtagaccagacagccaaaaagccagctgggaaacccaagggctggttctctcatgtggggagtgcaggaggtggaggggatacttatacctggactgatgtctacatggggccctttcaaagcacatagtagaaggatttgctgagcaaagaattaaagcaaagtccactgtatgtgcttttaaaggatacatttcccatttaccattcaagggatctatcctttttaaaaagcaaggagaggtctttggtctaaagccagaatactatctcccctggccaggccaccagaagcaacaacttatactttttccagatttcaggaacgtattggtccttcctgtcattgggtgccacttgtcttggacatgccaccttttccagccgcatcttaacagataatgttttagggcagctgtttccttgagattaactggtggggggcacttttcattttgattgatcttctcttcttctcctcctccttcttttccttgtcctcctcttcttcttcttcttcctctttcccttctcctcctcttccttctcctttcttcctcctcctccttctcctcttcctcattctcctttttttcttcctctgaacacatgccattccctctacctggaatacaccacccccagatactttttacctttttaattgagatataatttacataccatgatattcaccctctcatagtatacagcttagtggtttttagggtattcacaaggttgtgcaacgatcactactgtctaattctggaacgttgttatcaccacagaaggaacgcagcatcccttagcagtcattcttcattcttccccttcccagcccctggcaaccacggatccactttccatctctgcagatatgcctattatggacgtttcttaaaaactgaaatcatgcactccgtggtcctttgtaactagcttctttccctgaacatgatgttttcaaagttcattcatgttgtagtgtggctcagaacttccttcctctttatggccatataatactccactgtatatatgtaccataatttatttatccagtcatcagtggacgggcactaggttgttgccatgttttggctcttatgaacaatgctgcccagaccactcacatattaccttacctctcaccaatgactttaaagaagctctgccaacctgcatgagctgcacatctggtgacaggtttgtgactcagtacagactttctcctttcttctgctggcctcacacttgccccctgttaacacccaagtgttcttgttttgggaggagtgtaggcagcaccctgagttgtatgtgtctcttggtaccagctaccatcttgagtttgaagaacaagatggctgattttgaggggttctcaatggagcttgtgtcaacacagtgccccccattgcatgcaggaggaggttcccggtgctggaagttctatgtaaaaggccccagggaaggcagtaaggtccattcacttatccacctagatgccacattgaggctgaggccccaggtggccttatacataggaccagccctctatagccctggcctggattgttcctggagagggaggacctcagagggtgcaaggctttgttctgtcacctctgtcactttgttccactcatttttcgcctcactatagtcttccagccccaggccaaaaacagcataaaatagagcttctccatcctcccccagcacaccaccctggaccaccaggcactgtgcagattctgtcttccttccatggcctgagcttcccatgccctccctccctgcaaatcacttcctgctggactcttttccaaggctgggggctccatgaggacaggtgcctgtgctgccttgtttgtcctggcacactcagccctgagcagagtgtcaggatcacaggaaagataacgatgatgatgatgatgatggcatcgatgacagtgatgatgacaatgaggcttactatgtaccaagcattatcctatgttctttacatgtttctgaactcatttaatcctcacaaggattctagcagccagatgctattatctccattttacagatatggaaactgaggcacatagaggttaggtcatctgctcaaagtcacacagccatcaagaggaagagccaggatctgacattcacagtctaactctagagcacaggcctctaaccactgtcatggtttatacacatacactacatagatgtgagttgttctgggatggatggatgggtggacacaggggacctaacagtggcttcatgagaagccccgagtggcccggtatgccccattgagccacactgagtcttgggacagggttagctccccatggctgctgcctgtgtgcaggtaaggaggccaggaggtaggttagagcccagggctggaggcccacaccgaggaggctggcaccccctgggctcgtgttacactaggggctatggccagttccctctgcccggcctcagagccgagatcctagtccctgccgccgccggtagggagcctcggcttcctgtccattgtctccttggggcacacccggtgtgttcctgaagtgacctggagaggcagggagggagggaaagagggaagggggccagcccagagcctagtcagggtgggagaggggaaacgagaggggaagacttggtgtttttccttatttgtgttttgtattaaagaaaacaaataatatcctttgagaaaaccattaaacaaagcacatcctaaggccccagaggcctattgtggctgcctggagcccggaattcattcatgctttcttggctagattgttggaggcaagagagacgggggtgagaggaaaggattgttattaaaatgtattttgaaatgtgttgctccctccctgcactcaatccagtccaggccaagtggccataactccaaggtccctgtgtcctcctgagtctgttgttctcccattacctctctgggaagctccccaaaactggccagtcccagcatagccagggtggtcagtttcccccatgagcttgggggctgagccccgtgaaggcaaaacagtgggaccctcctttatggaacctgaatcccgagggctgcatgtgccccaccacagggtgtaacccacaggactatgatctctaactcactgtgtggccactctgggccttgggctccctgcctgtaaggtggggagtgggccaaaatagaccccctctgactgctctccagcagcctggaccctgtggctccctgtcatccagcgcatgctcaggtcgctgcaggtgggtgggagtcacactcaggctatggcctctgcatccaggcctatacccaggtgtcccaggtccaagccagaccactccctcccacttgactccaagccttggtaccccctactccaccccaggccgctcataatggaatggtagtgcatggtggtgctctctgccatgtccacaccagaacacacttttctgttggaggagggatgggaagaggtggtaagagcagagctggccatcagcccagcttgtgcaaatagctctgcctgtgatcctgcatttgcaggatctgccctgggttgcaaatagagggtctctctccaaccttgatgtagatgtagaaatagttgctgtcatgatgacaatacgcaaaagactatccttagaattttccccagttcctcctttaaagttgaaaaaggagcctgggcaacaaagtgagaccccatctctgcaaaaaatcaaaaaacaagccaggcgtggtgatgtgtgcctatgatactggctacacgggaggctgaggaaggaggattgcttgagctcaggaggtcaaggctgcagtgagccgtgtttgtaccacagctcttcagcctggatgacaaaacaagaccctgtctcaaataataataataatgatgatagtaatgctgaaaaagtaatttagctaattccatgttttcctaaatactccctaggcaatatagggaaagaagatcttgggtaaaaatttcactgggggtgcctggactaggtttaggagacaaatttcctcttcacagggcttagggttttcaggcttcacctccttggtcctctagcagcccagagaagaagggtaacattcccattgtgttatggaacttgtgcttagagaagtaacttgtcctgggatgcacagccagtgagctgcagaacctggccccagctctgttgctcattttctgcaaaaccttgaaccagcttgttcatctttccagatttgaatgtctcatctgtaattcaaggacttggacataatggattctaaggtcctcattgtccctactgttctttgattctgtaattccagcatcactgcctggtaggaagttcattgactctactgtttttcctttttcagtctggatttggtggttagagtctagtctctccaaactcttgatgtctttctgtcttagatgctggtgtacttagtgcagtcccagaggtgctttgctctctttcaggagttactaatgatcccccttcctccccccatgacacagggctaccacccgatgccccatgaagtggagatcgcacacaccaagaagctgttccgcaggaggagaaatgatcgaaggtaggagagacttcgtcgtgagctttgggttttcctttcctgcttctgccatctgtagcgacgtcagctttggcctgcatttcgcttttcccagtcaccagctgatcctgatgagatggggttggtggcatcgtgggttggttactggctggggattccccaggggcagagtggcggctccacttctcttgttggcctagggattggctcccttcaggcgtttggctgagagcccaccatcaccactgcctcttcctgggggtcaggcagtgaccaggctttgcagttcaggaggaaaaatgctgtttccgctgacctcaaagcaacaatagtggtcctcaaaaaataggactggctggctgtgtgttttgagacatggcctccaggaggctcctggagctcacaagtgcaagagtatctgttttcctcctccctggtcattgggggttgtccctcatgcgtgctggctctgctgtcacaggcaacacacagatcagcaatggcacatgctactgctcccaaattcctgggggaacccacttaaactaaggcagaaaccgagatctcctgtggagctcagactcccgagtgacaatggggccaggaaaggggcaatgaggtagccctggataagaacatgcagctgaaattgagcatcctgggaatgtgtgcatttattttcaaaaaggctttcttataaggggagatcttcaagatatattttaagtggaaaaaattcaggtgcagagtaatgtttcttatgtgtggtcatttatgcaaaagggggagttagagtatattttttgcttgaacatgcataaattatttctggatggaaataccaaaaaaagaacgaacaaaaaggcttatgcctcaggaattaaaatgaggtgttcctctatagggaatatattcttagataaagatgacggcttttggttctacctttaatgaacagagaatgttctctgagggccaagaaacagccggtggacatgccttgctcagaaccctagcggcgcctgtgctcaggctggctggccacctccttaggctgagaccagggtctctgatccttccctacgcatgcacaccctgaatagggattattaggtggtgactgcaactctcagggtggatgtaggcctgggtgcccagactgctttgtcatccactggtggattaagtggatctgaacacattcacagaggatggcaaatgtataagtagcttgggaagaaggcagtgtcctggcttagaaatcagaaccaccagacactttctgtagaagcaccaggcatcaaaaaggaacactgagcaggaagaggtggacccaggcctgttcctgccttgaccagagtacagtttatcgcatcgtgtgtgctgcctttttgctgtgcagcatcacagaggcaaattcctggtttctgggttcctggtagagggaagaaggaggcagcacccctcaaggaggaatagggttcacaggggcctgggaggtgtcagagagagcaaaggctttatgtcctctgcctctggccctgtagtctctgatggcagggaagacccagagtgtgtgtctgggaggtgtggagagtccccgagcttcctgatgagaagtcaccctctgccccacctctctgcgcccaggcaatggcaggctgccacccagcatccaggtcagcctgcatgtccatttctgggccaggtcacctcactcagcaggaagaccctggacagtggcaggcctccggaaagcagcagcgtgacccagggatgtaggaagaggagcgcggcatgcaacggctgggaagccgagcttccgctgagctgcgctcacattcaccaatgtccgggttaggtcagcacacctcccaaaggatgtggacgggccagggtccaaagtgaggcaataaagatgattaaaggggtggaaagtatgtcctgtgaggagtgctggagggctggggccagggaagaggaggccggagggaaggaacatcgtgccgtgaaactcatgaaagatttatacggagagatgaggggccgctgcctccatgtccacagggacccagactagaggaagtcagcttggatggaagaacagagttttcagctagaccgaagacagacttatggagcaaacatcttgaccatttggggcaacactgtgcaagtcagagcagcagccatgcctgaacacagagcgtgtgctcgtcggggcgccccgctctaattcctcttctagatgcggtagaatccgttactcactcacagcctggagctgtcgtggagtcctcaggtgatggggactttcaggaggaaagcaggcagccatatagtttaaggacctttttgtctaaaagcaggggtctcctgagtctgttttgggaaatcgtgggattctgccacccaaagagccgctgcagaatattatcaggtgacccctaaccttcccagctaatgacccatagtagtagccttgctaagtgtcaaacctgcatatttgaccttggaagtccatacttgtgtgcagcaggttcaccttcctaatattctgggcttaaactacactgggaggggcttgcatttcctgggcacgcatggtggcaaagggagaagtgaccagaatcagatttggtggacaaagggcacagccagcatctgtgccatgcctctgatctccccccaccatatgaagggaaggggccagctgtatccctctggtggcttggtggctctccttggaatggagaggagtctgtggctttccatcttcctgcaaagtggctggagttggtgtccgatagctgcaaactccaggcagcatgagcgtgctgctgaagctaggagcatgcaatttcccacagcctggagcagggattttcagactgggacctaaagtcctaggcttcatcaaagtctgtgtcccatcccagttccagctgcattctcaggggtttttgtgtgccttactgcttttattttccacttgtttaagtctgaggctgttagcaagctgaattatatagcagtttagggacatgccctggaattaggagctggatgggaatcccacctcctctcctcactcaccctatgatcttgccaattacatcacttttgaaagccctgtcccttcttctacaaaatgggttcactagtcagggagctgaaaggagctgattctaataaagcacctagaaacacggtcttagtgttggcccactctgcaggtcagagggggtcctaggtgctcaggaaggctttcaaggtaagtgtggagcacaggtgtctgcagtgagcggggagcttttgtcctgtgattgtggcagcaaacccggaaagccttgccctgcattccctccaggggcgggccgctaggatcaattgttccttcccctggatccacttttaaagccctacccacactgtcagagggggcagagcctgggctagcagggaaggaggccccttcagagtggtcacctgcagactctgctcctgatgccatgggctgcgtctagtgaattgtggatgtcttttttccattttgaaaaaaaaaaattaagctcatggacagttcaaaggtttcctcaagaatgttcttgacatttgaacaactagtaaccacttgtttgtttttggaagctaagaaaagacatttgctgatttcagacaaaattatgcattttgtgacataaatgtgctaaatgagtgttccacgcgttcctcaaagagcagcatgccttctgatgctctggccccatgcaagttggagacctgttgcttggaacgggggctgctaaggctcgttcccccccttttctcaaagctttctgcccagagcacatagaccagaagagcaagctcactagagggctggagacccggcgcactgcccaagttgaccctgagtgaggtccctcaccgctggggaggatattttctctccccaccacaccctggctgcatttaagagatgaacacattaaggcaatgaatggatgttgtagcctgagctccctgggaagcaggctctgggacagtgattatcagcagctgcttttaaaggcatgcctttggtgttgatactggtagaagatcaaaagaggaagtggtatcagcagagagaagttgggctgcagtgcagtcttagagagttctgagcctgtaggggaggttctgaagttgggctgactctttaagagctgtcccaagatggggtaaaggggcaggccttgatacctccatgtctgttggtcatcaggcagggactgcccaaggaagggagcgttaccttgggcggggctgcgctctttgcccagagcagttgtcctaggggttggcagctgagggctgtctgcacagcacttccagcagccgggaggcagtgccccgctcctgaatgtgtatcacagcagacactgcagtgaagcactgttcagttctcctactgggattggttgggctgtaccctgtgccataagctgtgcccgagaatacgggaagtatagggtgtggcccctgctctcgagggcctgagctgtagcttgcacaatggtgccttgactccagaagcaaccagaacgctgtgcatgactgtcagtcatccacgtgttaacagggaggaggcttagagaaagcagccatcctgggagatgctccagaatgcttcctggaggaggtggggcttgaactactagtgagacctccaggaggatttgggagatgggagggtgttgggatgagaggagcggtgcttgctgcctctgtcctgtgattgaccgtgactgtggcttggtgtcctctaaatgctcctctgcatctaagcaggctctggagccagggattccccacatccccagaagtcgtccccacatggctccctagaaacagagccatgtgggtggtgctcacagcggccaccacccccaattgaactacatagaagggaaaagccactggagcctgccagctccagatgatcccgcccgactgtcagcaatgtcagaagaccctgcaggctccaaagcccggcctcttaaccatcagaagaggtggctaatgtaggcattagtggtccatcgcaccgtgcctgtgcggccagggagacaagagagccattctccaaattaatttgtttcattaagtgaggtctcggaatggttaatttactccatgtgcaaagcagattgaaaggaagaagagaaaaagaccttagccagcccagctagtgtcagatggctccgcaggactagaggcaggggagcgagccatccacctggcgtgcggagtgggccacatgctggacgttgcagggtggccacagcctacagcagcgcttgctgcctctgtcctgcgattgaccgtgactgtgatttggtgtcttctaaatgtagaaccaattaagaattttggggccgggcgtggaggctcatgcctataatcccagcactttgggaggctgagacgggcagatcacctgaggttcaggggtttgagactagcctgatcaacatggagaaaccccgtctctactaaaaatacaaaattagccgagcgtggtggtgcagcctataatcccagttactcgggaggctgaggcaggagaattgcctgaacctgggaggcggaggttgcagtgagccgagatcacgccattgcactccagcctgggcaacaagagcgaaaatctgtctttaaaaaataaataaataaataaataaataaataaataaataaataaataataagaattttgtccctccctctcttcctctgccaacgtgaacccagaccctaagtgtcagtcatcagattggatttttcaagctctctgtaacatcatctaagtcactgataaaaacaaacaggacatatggaactttgtgaatagactaaaaagcactcaattatatactttaaaggagtgaattttatactgtgtgaattatatctcaattaaaaaaaatttaaagaataaggcaggtcccaggatgaagtgatgtggcaagcctcttgaaacaccccttcaaaattttttttagcaacagggtcttgctctgtcacccaggctggagtacagtagtgcaataatagttcattgcagccttgaactcctggcctcaagcaatcctcctgcctcagcctcttgagtagttctagggactataggcacccgccaccacacctgactaattttatttttattgcttgattgattggtagcgatggagtcttgctatgttgcccagactggtctcaaactcctggcctcaagtgctcctctcccgtcaaccttccaagtagctgggattatagacacaagccaccatacccagctacctcttcaaccttgatattttcagggttccctaaatgtgtcaggctagtaactgtttcaaaaaaggacatagatttggtctggccatgacttggtctgtgtgaacctgtgctagctattagtggtcaccttttttcttccaaaccatctgtttggcaatctcttttggagaaatgatatccatatttttccaatttttgaaaattagactgtgtatacctagctacagtctctaacacttttgttgcattattcagagttttccagagaaacagaactgataggatatattgagaggaagagagagagatgtatcatgggaattggctcatgagattatggaggccaagaagtcccacagtctgccatctgctgcaagctagagaaccaggaaagccagtggtgtaatcaacccaagtccgaaggccaagaaacaggagcatgtatgaggttcccagcgtgaccgtaagcataccatgtgttacagcatgggatgtccaagggcaggagaagatggatgtcgccactcaagaagagggagtgaagtcacccctcctctgccttttgttctgtttgggcccttggcggattggatggtgcccatccacactgggagagagatctttactcagtctactgactgaaaatgtcctcatagacacacctagaaataatgtcttaccagctaactgggcaccccctagcccagtcaggttgacatgaaattaacccttatatctgttctccaggattcctcagacatggtcaggggccatttatgacctcatgtaaagatttcttttactccaatcaatatcaatatcgccccattcccgaggcatgaaggtgagcactcagagcacccattgctctccgtggagtcttccaggccctcagcgtctgacagatgcggcaactgcagctgccttttctgggctggtacctgttctcttgcagaaggcaaacttggagtgggagaggtctactttctttttgccacctcttaattctacgctgtctgccccatcagtagcctcatgtgtccctctgacttctcactctcaatacgaaaatatgcttctagaattgtctttaatatttttaagccccattccttgacactgctgtggcttctgtatcccaggctttgatggtcatctgtgactacaggaggccccacattccttttcacatgtgggctcatgggcaaggactctgggggataccaagtgcctctcgacatccctctctttaagtcacagctgctatctggaacttgctgctccttttagcacctcagaacactctaccagtcatagagtcccacatcctacaaaaatgaccaggtcccccagatcttgcccaccgggaactgatgaggaattaacctagtcggagtcctatatctatacatcagctcattcacatgagttgttaagatagctcttttggaagtgcagtccatccttattactcattgattcatatttgcacattcgcctacttgtaaaacttatttgtaacaccgcactcaatactcatggtgtttttgcagtcagtcattgacacacaaacagtgaaaaatttgagttgcctgacctgcaagatcccagtccaggccaaagtaacactctgcctccttgtttcagctctcatagtataagcaagcacccttctcatggttctgtttactgccatgtttttcacatttttgtgcttttccttggtgaatttgctattttaaatggctcctaaacatagtactgaagtgccgtctactgttcttaagcgcaaggaggctgtgatgtgccttccggagaaaatgtgtgtgttagataagcatcactcaggcatgagttatagtgctgttggccgtgagttcaatgttaataaatcaacaatatgtattaaataaggtttctttaaacagaaacacatacaaaacgaggttatgtattgatccagtggtgaaaatgttgtgaccagaggcttgcaggaaccaaaccccgcatttcccctaggagtaatagttcagtattcactaattcagtatttgcagcaactttatggaatgcaactaccataaataatgagaagtgaccgtacttgctctttaaaacagagtagagagatgctgaagataaagaagtatgttgtaggcaacaggatcttaggtctgagtgatttatcttgttcgtgtgtggtggtagcttcgctaggggatgagatggggacgggggggatgcttcttccagtggtcattgtcctgcatggtttgactgagcctatcactgcttcatttgcaccatgctgggatgccactgttgctgaggccctcgcagacagctcagccctgcagtgactgtcattgccatcctgtcatccgagcccagggaccgcgagacagatctatgctcactttgcccacggtttgtctttccatcccagcaaggaaattgccctcattaagtccctgctaaagatagataagaaaatgggacaggcaaacccccacctggcaggcagccctgtcagattctaagcaaaatgagtcagataagaattatttttaggatccttctcctcctccctcacgcccacccccaagcaggctctctcttgaaaagaagagcagctcatttcttcaagccagatgtccaggtccatgcttgattgaaatggagcccctgatacacccagagaaagccccacgctttgtacaaatcatgagggtcccaataatcctttgcacagtgcagctgcctcaggccgcactcctgggcagaacaagctgcagagagtggccctgttgaggctggcccacaactcacccatgagggatataccttcccccgatccccatgctcaggacttcctcccagcatcacacttcatgggaatacaaggctctgggggttctctcccatcgggacccacatccacgcgggggacaaatgggtaagaaaagaggttgcctacagctcattttggcagagccctggaaccccctatgcccaccaggcagtgggcatcccctagttctgtgcccacagttggagagcagagtactactctttctcgatcacaataatccccttttccccagcaattagaattccttcagaccccttaagccctaaatagcaaagggagacccaatgacaagaaaggtgactgaagaggacgtaggggcacatgtctagttacctgcaggacaggagggctgctccctgagaaactggccctggagagataaatgccatttccccaaggtctgcgtctaggatgggacgtagaatggacgccttgggaaccagccacccaagctggtttcattcctcctcagaggtctagtctctactgaaatgctaggcatttgaggattggctcacaaacactaacacccaacccttcattcctctctggagccccaagcaacctggcctctggcaccaagccagcccagccctccccggggacagtgtgtctggtgggcagcccaggcccagggcgaggctcactggcttcaagacgagctcatctctcaccagccaggggatcttgggccctggacaaaccattcttcttatgtccccaaggacaccattgtgcagactacagggatgccattagatgccatgtgatggcagatacgagggaagtcctgaccctgtgtgcggctctgagtctaacctcagagaacgtgcatccccccctctctgtcctgacactcactcctgtgcaggaagaaaagaacactggaccagaagtcatggaatctggattttcatacttgtggtgtggttcagagcaattctcttacactttaagggtacacagtttctcagctataaaatagggctctgatttcagctctacaatgtattagagagagtgcgaggtgaagatgaaaagggacacttctcagggatattccattccttaaccatgggatgggaaagacagttctgaaagacatgttggaggctggccagggctttcagtgcaaataaccagtgtctcgtgtatcttcagctcagcccatgtgccctgtccagaaggttctagaaaggcagccatgcctgctgcccctgtgtatatttttccttccccagatctggcacacagtcatactaggctaagcctcatactcctggccctgtgcttttttttttttttttttttttttgtgagacaggatctcactctgttgtccaggctggagttgcagtggcacaattatagctcacgacagcctcgacctgctgggctcaagtgatcctcccacctcagcctcccaagtaactgggaccacaggcacgtgccaccacacttggctaaattttttattttttattttatagagacagggttttgccatgttgcctaagctggtcttgaacccctggcctcaagcaatcctctcacctcagcctcccacagtgctaggattaagggcatgagccacagcacccagcctctctgtcctcttgagatcgtatgctgcccaggaccgcaagattcacaggtgtaagtacccagccatacctgttggtgctcacaggtgtaagcacccggccgtactcatcggcactcacaggtgtaagcacccggccgtacccatcagcgctcacaggtgtaagcacccagccgtacccatcagcgctcacaggtgtaagcacccggccgtacccatcagcgctcacaggtgtaagcacacggctgtgcccatcggcgctcacaggtgtaagcacccggccatacccatcggcgctcataggtgtaagcacttggctgtactcattgatgtagcaggctgtgcatcccactggttctgagggtctttttcgctagactcccaggcaagcctggcccaccctctgccaagcctggatgtcactcagcaattcacaagcacttccagagcactcactgtattcagggcaccctttagctcatatagtcttcccaatgaccttaggaaggagatgctatttttatttccaatttacagatgaggaaagtcactagtccagaaaagtgaagcgacacaagcagcctggcttccaggcgtgtgctgctaacaacccactgctctgggaccccctccttccccatctgcagactcagcttccgtctgctgggcccctccctggctgcctcctacatactccccctgttaaccacctgatcaactcacatgcacggggagctaaagacggcatggtcctctttggggtgagggggctgtcatgtcaaatggactaggggagggctgctgcctcattcaaagggatgaatgaatgaatgaatgaatgaatgatgagatttcagatgagaccctcagacagggtcacccaccctcccaccttctccccacctgcactaggtcagtcctgcccatagattactttccttgtctggatgattcatgaatagacatatttaggaagccctcgaaactgaccagggatttcccagattgtggggaccccactcgatgagcacccagagggaaagttctgtgagttctggagtggtgggcagctcagggggtggggaggcagcccggccagaggagagcttcctccagctgttggctcccctgactcccaagaggacaaacccagagcatgagggtgcctttcactcctcagggctccccaggagagacaggggcacaggttttaaaaataccaaggagctttcctcctgggtcggcatttaccctgaactccaagagttatttctgagtcttcccagtaatttaattatagccatttattccaatgcatgtgttttggggaagccaaggtggcctctattacagtttggaatattttgggaggccttggtttccaaaagtgatgcagggactcaattaggcaagacaccagcaaacagaaataaaatagctcaagaagataggccctcaagttcccagaggcgatgcctgtacttagcacccacgggggaaattaagatgaagttgtcccctgggtgcttggtgtagtcatctctgtagcagcagcatatgccaccttctccatgtctctaagcacctgcagggatttcaatgcccttcaaattatgggctggatggggttgcccattctttccaagtaggcctggacagatgaacagcctgggcaccaggatttaggtcccccttgtaggtggacacagactcaccaacaacttgtgggatggcattatcaaacagcttctaacctttcaaataggcctttggaatcctcaactggttcgcgctccctgaccccctgctccttgtagatggcctgctccacctgccctcagctctgtccccacctaccctcccacccactgtcttcactcgctgtgctctccagaccccagtcttctcgctgttctttgaacaggcctgtctctgtcctgctcccaacactgaccagcccctgtacctcagtccctctcccttgcctcttgttcctgctggcctcctctgattctgcaggttctgctgactccttcctactcctccaccccttactattcatggcctcattcatcctcccttgatcctcttccctgaccttccctacagctgctgggcggggtccagcctgacacagactgagagctttccctgctgtgtgtgagctcctgggctcacctgaagcaggtgcggccactgagggacttagggaagggcagagggccggagagcatccagcacacacattcattcatgtctggagggcaagccccgggatcctgagtcacctcagcaggtggatagaggagcccaaaacagaagctgctgcctggagcccacattatctgcattgacacccgcctgcaggaatacgactgcccttgtgttggctttgaactctgtctttcagcttcaaggggaggatttggtggacaaaagatctaattttaggcttattacttgtcaggactgacattgaactcaagaaaagacatgtgtgaacttgaaacaaagatgagaaatgtttttagaaagagaaaatgtgttctggggtggtgtgcatgtttggtctggtggtctgtgtggccacagcaaacacgtgttccagactggctctgcatgtcagggagcagatggctcggcctggtcaccctgagcaggaagcttgctgcctttgagctgtgagctgcagccacggtgcaaagaggctgggcggaggctggggtgagacacttagagggcaggattctgactgtgccctgatattcaggagggctggcggtgctcagtcaggggtagggtaggaacagtgatcatcagggcctctttaggcagagcacacaaaggccaattccctcccaaggctccaccatcccaattcctgtcccaacgcccctcctaggatggcaggggagcctcggcgccctttccgggagacagccccggtgtattttgactgtgcttccttactctacaagcagtcaaggacagccaccttctgccttcccaccacccccttagggtgagaatgaggaggagctcccaccttcctctactctcatgctgccccttttgaccccagatttactgctcctgcatcccgttttgtgaactggtgtgtcagtggttgatctacccttaatggtaacccagggcatgttactttgcattttcacttgagccttcagtgattacccagagttaagagaatgatttagtttctggcacactgagaagctcccacgtgtgggaggtaggtgagggtgggtatatgtcatgttatttcaaggcagatttttttgctcctaagagcctaaaaccatcccacttgaggcaaacccacattttgcctctgactttgttgcctggaggtcatatcacaggagccacaccagggcccttattccagcctaatgtgtaggtggtcctttgagaatgctgagttgcctagacttcattcgagtcctgtcactagatatgtagcctcaagacatcccttcacctctttgaggcatgttgctcaactataaaatacgatatccaccttgtaagagtgttctgcagttcaaatgaggtgatgctcagaaaggaggtaaaatgccaagggcaacacaaacctgaggacttattgcctatatttgtgtttgaatcacacatgttcggtttatgtttatagttgtggatatgtacgtgtgcatgtgattgctttaggactctgctaatcatcatttccaatgataatttgctggaaatggagcttggcttggacgtttgtattggggttatctattgctgtgtaacaaatttctccaagacgtagagtttaaaacaacaaatatttattatgtcacccagtttccaagggtcaggaatccaggagcagtttaacagggttgtcctagctcaaagtcacccttgagagtgtagtcaaactgtcagccaggggtgtaggcatctgaaggcatgactggggctggagaaagcccaagcagttggagaacagcctccttcacaaggtggttggcagttctcagtttctcattagctgttggtcacaaggtggacctcttcatagggctgttcatgacatagcagctgacttgtcccagagtatgatccaagagagacagacaggaagacaagcagacagacagacaccaagatcgaagctgcagtatgctttgtaacctaatcttggaagtgacatgccatattctaccatattctgttggtcacatagactaaccttggtacagtgtgggaggggactttacagggatataaattccataaagtggggatcactggggacaatcttagaggctgactaccacaacccaccctctcattcccagtgactcacatgcaaaatagtctcacccctcccaatgtctcatttgattatagcatcagctccaagtccaaagtctcatcatctagatcatgttcagatgcagatgacgctctttgggtgtatctccttaagtacagcacctcaggtacagttcactcttgatctgtaggcctgagatttaaggaggcaagttagctgcacacacacacacacacacacacacacacacacacgtagccaacatacaattgtgggacaggcatagggtaacagccttagatacacttattcaagaagaggggaaacaagaagcacatagacattgttggtccatagcagttctgaaatccagccaggcagatattggaagtttcttgattagaactcagttctgttcctgcccaggaattattctacaaggctgtctccgccctctgcattcagggtctttcatgagattgcagcaagtcatgagcccagtgaatactctgggctcttggttctgcctctgagtcatccttccttttctatgaaaggtagcatgtctttgcagctgatttgttgctcagatagcttcctgctggtagaatttgggaggtccaagagcttctttatattttgtactgtgtctctcccttccagtccaagttgttgtgtttccactgaaataatcctttgaaaaactttatgggtcttctgtgatcctattgagtctgttccaccaaataaaagcccacccacacatctcttcaagaccatcccttctctccgctgggcttctgctgagggacaatgcccttaagcttcttagaagctctgttgtttgactgagaagatctttaacatctcttaaaatctttacagagcttttggtctgactgaatagtactctgaggcagcaccgctgaactttctaagatcttgacaaagacttcatagccacaccctccacctcatctttggactatgctttcctgagagtgcctggatttgatctttacgcagaagtcatttcctaattttagcatcatttgccatctggacagtctgggactcttcaaaactagcaagtcctggatttttttttattgtgacagcccttcttttaacttgtctctctcttctcacattttacctagcaagaagaaaccaggcagcccctgcaggaccctggctaaaaacttcttccttagataatgcaagtcattaagtacattttctgcttttcacatatctgtaggagacaatgttgctaaacattttggggctacataataaaaatcctccttcctctaattcccaataatatatttttcacctcccttaaagcccccatcaccagtctcctcaaagtccatatttctaccagtggtctcttcatggcatttgaagttttcactaagaatcaccccagaatgcttctggctccggcccactgcccagtaccaaagccactctcacattgcagagtttcactatggcagcaccctacttccaagtacccaaagctgtattagttatctcttgctgtgtaacaaattactccccaaatttagcagcttaaaataagcacttatgatctcacacagtttatgacggtcaagcatccagaagctatatagctggggagttctggctcagggtctctcgtgagattgtggtcaggctgttggccaggattgcggtcatctgacacttgactcagatgggactggaagagccacttcccagctcacggatgtggttgctggcaggccttggctcctcactggctgttggctggaggcttcatttccttgcaacgtgggcctctctgtagggtgctcatgacagagtgagtggcctgtgaaggagggagggggagagtgagagagagagagagagagagagaaggaaagagagagataagctgttggatcttttgtaacctggtctcaaagcaacataccatcccttctgccatattccattggtcacagactaaccgtgatgtggcaagggactaaacaagagtttgagtgtcaggaggtggggaccactgggagccacctttatctgttttgagttccttcctgtaccattgctttttccccccactttaaatgatctagtgaaactcaccggtagctttgaatgggttgagggtttttgtgtgttctgattcaacttcaaacctctctacaaatgccctcctcatcctgtcctcccctctgcgcttccatccttcctgcccatggcccctctccatggtggggcatcagtgaagacgcttcctgcctggggaagatttgaagccaggggatgctgttgccagaactttggaacacccctcttacccagggggtccagcagatagttctgggaaaaggaaactttccaagatacacacccaccttccccccaccaccactaccacacacacagacacacactcacacatgtaattattttcccttaaactctataatctcaatgattataaaaagtttgggctttaattggaagcatattgaaatccttgcatctgtcagacactgacagagaaggcttccttgcttaggtgggaaaataacccaaatattaacaacacaaataaagatggctcccccagcctttctcacagcagccgccagtggtctgggaggcagtaggatgagagctggcgtccccatgagaagagtgagatcagcgagactcagaaaggtgatgcgatttactccaggccttgcagagctgaggctggtcccagacatccagacgtctggattcttttccacagggttctggaatgttggtcctgtggtggaaaacacgtgctcctttttcacccacttggggatccgtggtgatctggagttgtcttcctgtctggggagggtggtcctgcctcgggtagaggaccagatatggtgggggttcagaatgctgtggagggaagtccctcagaaacggaaatattttggcaggcatgaggaaagattgtgagggagcacccagtggtgggacagtggcgatggacagaagaggactcctgttaatccgctctttccaatccacccagatgcccttccctgcattttgaggcatccctgggaggactgcctcaggaggcttcacctccaggtggagtctcaggtgaagtaatagtagccggctttgtccacagctgtgctgcccagcgcagtcaccacgagctgcctgtggtgatttacacccattacaattaaataaagccacaagttcagttctgcagtcatattggccacattcagggctagccacatgtggtgaagggcctccacagtgtgaggggcccccgaggtgtgaggggctcctgtggtgtgaggagcccccgaagtgtgaggggcctccgcggtgtgaggggcccccgcagtgtgagggcctcctggggtgtgaggggcccctgaggtgtgaggggcttctgcggtgtgaggggcccctgcggtgtgaggggctcctgctgtgtgaggggcccctgcggtgtgaggggctcctgctgtgtgaggggcccctgtggtgtgaggggctcctgctgtgtgaggggcttccacggtgtgtggggcccctgcgctgtgaggggcccctgtggtgtgaggggcttccgcggtgtgaggggcttccgcggtgtgaggggctcctgctgtgtgaggggctcctgcggtgtgaggggcccctgtggtgtgaggggcttctgcggtgtgaggggcttctgcggtgtgaggagcccctgaggtgtgaggggcttccgcggtgtgaggggcttccgtggtgtgaggagcccccgcagcttgaggggcccccacgatgaacgcagtgtgaagggccccctgtggtgtgaggggcctctggcagtgtgaggggcttccgtggtgtgagggacccccgcagcatgaggggcctcccgcagtgtgaggggcttccacagtggaccatgctgctctaggacgttttcatcatggcaaaaatcctgtcagatgaccctgctctggggaaactctcccagcccagagaggcaggcatggggcagttgcgggagaagagaaaagtggagaaccatttggaagggtctgggggccagggaaaaggcatgaggatgagaaagaagaagctgagaaagagaaggggtgctcatggagcagtgtgtggcccctttgggtgctcaggaaatggtcattcctctttgatctggggctcagagaggcagacagtgcctaccctgttggggtttaaaacccacaagggaggaccacctcctgcagcaccttctctcaaaagctccaggcccactctgcagaccaccaggacccccaagagctgtgcagcctcaccagcagctgatgggcatcactgggagggggtagagaaggctcattatgatggtcaattcaggacaaatcctttggaatagggagagatgcctggaagcttctggagaatggagaggtccccatttcctaacccaccattggtcctttgtcaccatattccccaccctctatgcctgagtggaactccgttaaccctctcattcctggagaactgcacaaaccacatctcaacaatgtcttcccagtggccacctaactcagcttagggacctagtaagggcttggtttgtctgtgataagtgaaaggtgtgtggatggatgggatttcttcaaagtcttatatggaaattatccatataaaccactgaataaagaagacctctttagtttttagcgggttgggaccagaaacccaatggtcccttaccactgcagtgacttcattcccgcttattataacagcaattattgaagctgctttttatgggacacctcctaggctgtgcattctatctggattaggggtcagcaaagttttctacaaaggaccagagaataaatctttcaggttttgcaggccatagggtctctatcataactcctcagctctgccattgtagcacagaagcagttatagaaatatataaatgaatgaaagtgactgcttgccaataaaactctgtttccataaccagatagcggctccattcggcccacaggccaccattggccaattcttgttgtaggttatcatgaatcttccaacaccccgaagagaatgaagtttccattcctaccttacagccgaggagaccatgctgcagcagtgcattcacctggccgccgggctcacatgccttttgaggcagacctaggcctatccaagcaggactcccattccctggggtacgttttgatgtggaactgcagaaggccttgccagaggctgccacgggagacctcaggattcggggtacccaggagtagccagtgatgcctcaggggtaacagaagaacctggaaggctgtaggaaaaatagaagcctgtttcccctgcttcactgaggttgtaaggcaaccccgagaaggcagaaggggaccagcagggcagtgcacacccaggagacagctcttaccttgatgacggggctgaccagccggacactgccctgcttggaccttttttatgcccaccacagggcaaccactgcctccagcatcccccctggagaagctgctgcaaagccgtccccttctatgggagccacagcttgaagctaaaacaagagcccaaagcatcttcaggtgtaagaagaggtctctttctttcttgttctcggcagcccatccttccccagctccttctggacatgaggtttcttgttaccctcttcaagttcctttggctcgcagcattgcctctcctccagacaatatggcctggccagtgtgacctgctcctgtatgccctccagccctccccagccatgccacggagggacagagctgtccagatcccagccagggtctccaatttgtgcaaggcaggaggaggcacatgtcactgatgtgagagctgtctaagggtttcattcattcgcgttttcaatagaggccgtggtgtgccttgcagatatttgatctacatcaccataatcagacaagattgggcatgttcagggtggtgtggctgtagacaacatcaccatcatcagaaaaagaaggaggaggaggagcgttattttgagaggcatcgggggcctggttgcctggactttcatcattagtgcatgcttatttgggttaaaaattcataatccctgtggtcccttccaaagcgtagctgccctggggaggcagtatcccaaggcactcggacacctctgtcactaactttttcaagtttgtggattatagataagggaggaggcgaggaggggccgagagggaagtgggaaactgtgtgggagggggtgggtgctcagagtggaagtgaagatcaagctgagtcctctaatgatggtgctgggcccctgcctgtctcttctgggagtcactgcctccatgtgcattaaccctgcagatccagccgcagcctgagtgttgaatagggctagctgagctctttgctgaccactgtctccagtggaaaccactgagtgcagggtcaggagtggggtgctctcagacactgatggagccatgcccaagacccagggaacatcctgtggctggggaggagttacagggaaacagattgtcgggcaagggtctctggcccccctccctggcagtcgagggcacaccagtgtctggagacagtgtgggtgctgagctggcacatccaccacagagcaactaggattattgaggagaaggaggaaaattatctgagcccacctagggttttcatttgcagcccgtgatgaagtcagctggccaagaggtcagcttcaggccacgcctgtggggaccctcctggctcttcacactcagctcccaccagcccaccccagagtgcttgctcccaactcaccctcgcagcccttccccctggaaatcataactaagccctcccttcccccagtctctcagggctgtctcagaactaagctttccagccggagaatgctcggagcatttcagcaggggtcttcattctcaaggaggcgggtacaatttggggctcaataaaagggatatttgaaaataaagctgggcatccacccagcaaagccagttggcaatgccatgagggacgctgtgttcttctaactctgctaagcctgccctgtgagccgtggctcaaacccagcatgggaacttcctgtaggggaagaggccaggctgtttggaaaagagacctcgagtccccacccacttcccctgggacaaggagtggggagaccctcggctgcaccttctgtcccccacccccagcattgctgtggtcagagataataccaggttagctacattaaaattatttgggctgggctcagtggctcacgcctgtaatcctagcactttgggatgccgaggcaggtggatcacttgaggccaggagttcaagacaggcttggccaacatggtgaaaccccgtctctactaaaaatacaaaaattagccgggtttggtggcacaggcatgtagtccccgctactcgggaggctgaggcaggagaatcgctagaacgcgggaggcagaggttgcagtgagccaagattgcaccactgcactctagcctgggtgacagagtgagtgagactctgtctcaaaaaataaaataaaattatttgaatcccaggattcattggggttcatttgcatcctgttcatcatcacggcaacattctgggagagaaagggaagacttccaagaggctgaatcactttgcagtgttgacctcacccacctcatgaccccagggtggtgggagcaatgcccttcaccagcccctgtatggataggaagcaggggctggagaggaggttttggtcaggaagggaggctctgtgaatgcttctcgcaagcctagactgagccaggcattagaggagcatcccgtctagttggagtgaggtgattaagatatactgaacaatttacacttaatatcatattgctgtgtgtgtactcctgtgtacatatacatatatggtatatatgcacatgtgtgtttatatgcatttatatgcacacatgtatgcatgcatattgcatgtgtgcaatatgtgtacaagtatgtatatgcatgtgttatgtgcctatgcatatgtgcatgtatgtccagtttgtgtgcgtgtgtgtgtgtgtgtgtgtgatggcacagtgcagcccataaggccctgtaacttcagagaaaggaaaggctttgcagtttagagtagccaagaagccttcctggaggaggtggaacctgatccgtctctgcaatggggccagcagagggcaaggggagagcattcctgataagtgactgagcagagacaaaggcccagaggtaggagcagagaacactgttaggaaagaggccaagccagggaggaaggtgtgagaagccagtgaagaattagagccagtgcgccaactcttcactgcatctgtggctgcatctttggatgtcttgcatgcagatgtacaggcagcaagtccaagagagcgtgttgctggagggacagccggcgcacaggcacgtggcaggaagcacgtggcaggtggaggatgtggaggaagcaagtgcatgcttgagagaaggagactggaagactggaagctaaaaggggaaagagggaaggaggtgaggacagggtgtttgaacagattctgtatctccaagtgtccagtggagccttggattttgtcttgagtcccagagcccagttcctacccatttagttggagtcttgaggattcttgccagtgattaagtttcccccatcaaaataggctatgatggagacttgagattcccttacccaaaggtgcctgggtctggtgagaaggaggaggcgctcccattccatctccagtcctccctgcgagctgcagccatcaatctgggacagagatactaaacactccgtaaatgtttgtggatggcctcttggggagggctgggctggttgtgatcctgtatgtcatgggaagcggaggagttggaaagggcacacccgggtggtctggtggttaggatggccccgttcctgggaatggttgccacgaagcattttccctggcttctccatagaagcgactgttccttcccggagtgttatgaaaacctgcaattaccaagccgcctctgggtgcgagcattcagacctcctcttctttcttccaagatacactgagtcaagacctggtcagtgcagaaagcgggttcctctcccacattccgtcccgcatagccccatggggctgtggttaatgagcttggtgattatgtatttcatgtctgggatgaggaaggtgaagggcttgagtgaatgcctgtgcctctccaagttctggagcaagctgccttctgcactcggcatgctctgggaccactcagcagataccaccatgtctctggggtttggggtccccttcttcctccagctgcactgagtggaagccagagctgtgcatagaagctgggagaggactcaagcaggaatgtgcaatgcagggcttcatggaacgctccacccagactgccgccttgggatgcccagagtttagctctatcctgttcctccgatgattttccttctgggcatatatatttcctggcctcttgcctttgcatgtgtgagtcgtgatgggggttgggggaagaaggaaaaacatatagaatgggtggctccagacttgaaattttcacagtggaagagagaataaaagcaactcttgtgggtcaggaagtttctggacctgccgcgccatggccagtgagcccctaggccccacatggccctcctggggaagctgacattggcccggcctcaggcgggcaaaacataaggagcctcctgtcagggcaggccaggcacgggggcatggcctcttttttcctgggagagcagtcacccctctgtcacctgaccagctgcccagtcacttgctgctgcactcacgttcacacagccgtgaactccctagaactgcatctgctcaaactgctgcttgacccctgctttgcatgctttcttctgcctcctgctcacagtcctgtctccctgattctccacatggctccatgtcacccagcagtcctgtgccccactgctgtgcagagaagccagtgatggcccctgcatgatgagagactcctgtgtctacatccttcctccaaggagaagttggctagttctgtggcttggccgggagtgggtttgggtcagcttctgcacagtgtccattttaaggccaatggtcaacatcttgtccaaggtcctcattttgcagcaagagctgggctccccaaggtgggacccttgccattagtagagcctgactcctaagtctccagctcctgccctggtgctgctcccagcatctcacaagaccccactctgtcacgaagaagcagtgaggtcatgatgttcagaagaggaagaaaccacaaaatagcctattctcttgcaagctgctgcacatggaattctaggggctctttgccccttacccagagtggtaggccttgctggaaagcagaattgaaccaccttggaacaggcaatttttagaaatcaatcagatggatcaattcattaaaaaaggtcattcctaaaaatcaaaagcagaaggaaatacatgaaccttactaatgttaactgaaaaaaaaaagcaaagtaagaaaaagtatatgtagtatgctactgtttctctctgaaaagacagatagaaatatatattcctgcttacttatattaacgataatgaatggatgggtaaacataaaaccagtaaagtggttatttatgggacacaggggagttagtagcactagatatctctgaacaccctgttttgcagatctgaccttacaaccatgttaaatgtttcacataattgtaagtagaagttagattgatacaaaaacaaaccttttgctacgcctgagagggcaggcacctgcatgagctaaggcatccagaccggctccttgggtagcagagggtcccccagccttctcaacatcccacggtggggtgtctaatacacttctcaaagttgcatttccaaaaccaagcttccatctgccccaagcctgccccactccctctgtcttccccatctcagacaacacagcttcatccttcttgcagtcgctgaggccagacaccttgcagacattcttgactccagcccttctctccacccgcagtggaccatcagcagttcctgcgggtcccatcttcaaagcagatccaggatctccacctcttactccctctactcctgcccgctgggccaaggcagtgtgggctctcaccgggattactcctataacattactatctttgatctcacctttttcaatgtcatttcttagctcagaaccctccagtggttcccaatttcatccagataagggccaaagtcctttcaatggtctgcaaggccccagatgatctagctctcaccacctctctgacctcaccatctgccctcccccttcacactctgcactcccgccaccctgccttcctgggtgccagaagttccacctcggggactttgcactggctgttccccctccccggattgctcttctcctgggtatttgcatggcttctccctcccctccctcaagccttggctgctccatgtcaccttctcagggaggcctgtcttaaccattccacctaaaaaggcagtctccaccaggggtgcccccaccatacaccagcattcccagttcttccagcttcccacttccgtaggccttcccacgctctggcattctccatggtgcatttgttctgtttatcttctgcatctccccgctgggtgatgagctgagcctggcatgagtaaatgctcactaaaccactgtcgagtaagtgaatgaatggacaagaaggtagccagccctgctcaaaagcacttactttatcctctcagggcctttcagcacctcgcttagggacctgcccagctccttgggctacctcccatcctgcagttcccctcctgagaccagacataagacaccccaggaagtcttagcctcagagtccagatttgaagcagaaggaaaggtcagctcccactgtccaccctgaatagctggtccccctgtctctaagtcttctcccacctcccagggcctgtgacattgcagagatgtgagtgtcctcatctgggtgggagtcattactcttcatactccccatcaccagtgggacagccaagattcctcccggcataggagccttcaggacagagcagagggagttgtggggcagagttagcacaggccacagtgggttattgagggaaactggggtgtcagaaggacagacctaacccccaagctggatgtcaggcaaatgcactcccgtgtcgtggcccatgacgcctttgtgaaggacggaacccctgcctgatgggccactgcggggaggttttcagttggacttgacggcccttcactcacctggtggggtgtggtgggacgggccacagtacaaaccctgctctggccctggctctgcccttgctcactctctggcctgtggacgaacctctctgcctcttcccagtcacttcatctttgaagagactgtcatcaccgccactcacagggcagcagtggagactgagtgagcctgtgctgagggtgctgcacccatactgggtggttagcatttcaaaatggcggcccggcagattggcccttggcggggcccttcccaggggccactggaagctgagaggcctgtggggcacagctctgtcatacattgtggtttcaaagcccacaaattcctttagtaattcctctgctctggaatcataggagggagttgtgctggtagttggaatatttacccgtcggctcctctccctcccgtcttcctccctttccctggatgtctgcctggccatctgcagtggcccaggtgaccttctgcttatgtgctgtggggtctaccaggctattgcatttaataaactcttaagagcatgtctcctgtgtttgaaggactctacaaatatcaatgcacattgtcagtacaaccaccctttaaggtaggtgctattatgttcacatcttacaggtgagagaagtgaggcagagagcagttctgtaacttgcctggggttatacagcaagtcagaggcaaagccagggcctggatgcaggcaggctgccatagagtccaggctcgggcaattccccttctttctctctctgctcagccccttgggacctctcttggcagcctgtgacccagccgtagccctgcccctgaagcccagttctgaccatccagcttccaaactaagagatggccccctgtagccaggttcctgcccttccccctaccatcgacctccagagtcctccaaaacctggcccaacctaactttccagaacctcttcctgcaaccccaccctcactggccatgcacctggtgtctccatcggctgggcctccgtactctctgaccatgcctgggccttccctgctggactgtcctttctccagaaacctcacccaggctgcaagtcccagatctgctcttagcagaatggtcagggtgagactggtgttcctcagtttactctggcagttttatgcctgaggaccaggagcaagaagtattttatatccatcactcaggatgtcctgggctactcaggccttgcccttgtcctgccttgactgtcacctcttcccccaccacgcaccttgttcttttgtgtccccagggagcagagatgctctggctttggaaggagtggactccagctcctgggacctctgcctacccgtggtcaactcattaaaaccattaaaaaaattcctcatgggttctagaaatattacagtgttttatttgtaatatttatctagccctgcatgccccgaccctgccaagtccagaaatatagcatcgtggttaagagtgtaggctctcctcagcttccagctttctagctgtgtgacctggggcaagttacttcacttctttatgcctgtttcatcagctataaaatgaggacaataatgccactgtctaccccatagaattgtggtgatgattgaataagcacatttgtgttcttagaatagtgccttggacagagaaagcaccatgcacgtcattcattatcatggtggttgttgttattattgttagagaagagaactggggcccagagaggtgtttcctctaagccagtgtcacacagctaacagccacaggttggagtggagccagcagcctgcctctccagccagggtctgctctttactctgcccccgccccccctccttggtacatgttgccaggcagtgggtactccgtgagcttaaaatacccaggtgctaccctaccccaccctgtgtcctgccagctctgccagcactgacctggcccactccatcagccaagtgaccagggcttttttttttttttttttttgaggcggagtcttgttctgtcatccaggcttggagtgcagtgttgcagtctcggctcactgcaacctccgccccccaggttcaagtattcttctgcctcagcctcctgaagagctgggattacaggcatataccaccatgcctggctaatttttttgtatttttagtagggatgagattttgccatgttggccaggctggtctcaaactcctgacctcaggtgatcctcctgccttggcctcccaacctgctgggattacaggtatgaaccaccatgcccggccgaccaaggccatctttaagaggcctggctcagtttcccacccaaaagaagtggacttatggggctgagagcctcccactctgctgtcctctcgtcatcttcatcttcccttgggccacactcagcacaagaagggagcacagggcgcctcccggggaacagagagccagcgagtgccactgggaccaagggcttgacacctgcctccttgtcccccagctcagaaaccacttaccagggctcctgacccacagcaaaaatctaaacattcatttccagtggagctcaataccatctgcagaaagccaggcaggggcagaagaacaggatgtggtccctgcctgcctccagggatgagctgtggacataggccataaacaaggagacatttactctcaacactaggaaaaggtcctgggacagacagggcttttctcatgggccagggtgaccaggaccgtttcccgaaggagacaacacacgagctcctcaagaaccaagagaagatgtgttgaggcaaagatgagtggggtgggagttcctgcaggggaatggcgtgggtgctcataggggaaaagaaaggagcagggcaggttacagcacagtgtgcagggtgccccgggattcttctcaagtcttgaggctccccagagggcaagcagaggaatccaaacccttgtggatgctccccaaaggggctgcagacccgcctctaagaggctgaacctgccacaggaaccgtagcaatgccagaggaggcaccttctgcattcgggcctccttggttcacacgcagacagcgagagcaccatgcccagagtcctgacttatcactgctgccatttcccgagtgagtgatgacagcagcagcgggatcaacttattgagccttgctctgtgtcagagccaaggcgcagctcatttaaccctcagaagccagtgcaatagactttatcatcattatttcacaaatggagaaactgaggcatggacagtaagcaccttgcccaggggcccatgctagaaagtaactgggtccagagtctgtctgggtccagtgtctggctctccctgcttctgccaggggtattggggtgttttttcatctttaaacagtgcagtgtgagtccttgcctatggtcatggggtgagcatcggggcttcacggagatgggagcagcacacccaggacttggcccctccaccagtctatcactcagcagcccagagagccactctggtggttttgcccattacacattttaaattatttttattcttagtcaaatatttaattttttacccataatggacagttggttaaaggcaggaagcattaaagaacactgatattaaaaggctggttcatgaggaacacgtaagtggtaataattctgcacatatgcctcagggtgctctggccggatctgcaagcctcattcatctggtcagagttctcgtgtggcagctcctgcagcttgcagagcttcacaaccccgggctggaggcagacagagcccaacacccatctgactctgtgtccacacggagccaaggccctcctcactcacgtcgtgcaatttggacagaagcacttcctaaaaactctcgggtctcagcatttagaaacaaagcaagaatattacaaaatcaaaccagttgactttcatttttttagaaaaacataaaattcaagaattccaaacagcgggccatgaaatcagtttttgctttttgtttctttttatgccttatatagtcaaactttagcctgcagtttagtgtgtactgatgccaaagccacagtgtaatggtaatatgtcattttgaaatttctttgtagaaaatcatgcttttgcttttacaactcgtttacaataaatgaagaagaatgcatcacttgataattggcagaaggctaaattttgcctgtattcataaatgttattaaagatcgggttaaacacaaaccttgtaattcacttccaataacatatcaatctaaaaactgtatttgacgtaaaataacttctttatctggtagtaccaaaaataacaattttttttttaacacttaagagtgtttccaagagaaaatattatggtgagaggaattctcaaatcccaaagagtcaagcaagattcagctgtggcagccctctaaactgccccagttttcatgaaggtaaaaataagaataatgagaattcatccttttccctcccgttgaggggctaagtctcctggtaagtgccttataggcccacccctgagaggaggggcgtactttgagaaatttgaccacaagtgctttccagaaggtcaaactgacttgcttatggtgagtgctggtacacaggccctcccaagttccccaagatgtgggagggtttggccacccttcagactgtgcccagacactcaagttccattagggattctattggttccaagtacacagatgcacaatgagctctgtgttcaaccctggtagcgccatcctacggtgaggggtctctgcagtttcacctcctgctaggtgcagcaggacccccttgtgtcaattttattgtatttcatttggtttgcctggtgcgtaagaaattgacttaagaaaaattgccaccaagcctttgttgagattggcatttcttctcgaatggcctcttccctcctcccttttaactaaatcctgcttatttttaaaaacttttgattctgacaaaatttcagactctcagaaaagttgcaggaatagtacaaagaattcttatatatccatcacccagtttcctgtgatgttaacattttatccttctctctctcgtatacatttttttctgacccgtctgaaagtaagttgccaaaatgatgcccttttactgctaaatatttcacagtgtgtttctttaaaacaaagactttttttcataaccacaatacaattctcaaaatcaggaaactgatatagatacgatactgtaattgagtctgtagaccttattcatatttctccagcgatcgatcctagactgtgggctgcattcgattgtcatgacttgttagtatcttttatcctggggcagttctttcttcttctttttttttttttcttttgaggtggagtctcacgctgttgcccaggctggagtgcagtggcgcaatcttggctcactgcaagctccgcctcccggattcatgccattctcctgcctcagccttcccagcagctgggactataggtgcacaccaccacacccggctaattttttgtatttttagtagagacagggtttcaccgtgttagctaggatggtctcgatctcctgaccatgtgatccgcctgcctcggcctcccaaagtgctgggattacaggcatgagccactgtgcccagccaacctggggcagttcttaagtctctgtatttcatgacattggcctttttttaaagagtgaccagttatttttgtagaaggtccctcagcgtcggtttctctggcatttcttcatgattggacttgggttataggcactgtagtgatgtgaccttcccagtgcaccatgtcaggaggtacgtgctgttctttaatcccctgcctggtgatgttaactatgattacctggcaaaggtggtgactgccaagtttctccactgtaaagttacaagttttccctttgtaattaagaaatatctttggggagatatttagaggctacgccaatgttctgtttttcttcaaaactttcatccactgacttccattgatgattcttgcttgaaacaattgttcttatggtggttgccaaatgattttctaattccatcattccttctaaatgtactagttgtcttttatcataagggaaagcctttcattgacttttaactcactgctctaagcctcaggacctcagcatttgggaactaggagagcaggtccttgtcccagaatacacgggctgtctcctagctgagtggtgtttaatgtgaaggttatcagcgtcctgctacaagtcccttgtattttggaaggttctagacaaagaaactatctgctggggagccatgtcccaagatggctgggctgggggttccactatgcatgaagccttgaggagtcctctctgtgataacgtctcaccatggccccatcagttccaccagccctggctcaaaaacgtggcccaggggaggccctactccagctaactccgtttcacatttcctctccttcccaggatggaaaaacagcccttcagggacaagcgaacctgtcagtaattaagtcatgagtggaggaggcagtcccagaagggtggctgggctgtgaggcctaatggagtgaggcggctggcggcgttctccgccaagagcctggaggctccacagcccaggaagcccaaccggctcctctgtgtcccatctgtggggccatctttgcttcacgtaggggcctttccccaagaagggctggacaaggtttatcatcatcctgtggtcagcacttttagcttgggctgttacctgttttccagcccccaggcacacccatgacacctgcctgctctcagaggtgccccaggctccacactttccctcttgaaaagtgtctctcttgtgctgccctcctctgagatgcttatgtttgggacaccagggtcacagcttgctggcctgatgaagtactccgtgcatactgattgaagtgagaacgtgtggggagggtcttgatggatggggaagatcaggcgcagggacaagcagatgcggcactatgatggtggcaccacctctctagctcttgcctggtagacaggaggtccaggctggccaggaggagtcaggaattaggtgagagggagcattgtcaccaaaggtttcaggtcagagcgtggcaagatgatagtcacggccacatagcaggatggaggggagaggcctcagtgtggcatggtctcttcatccagaaacagagactttgaaggtctgggtcaaaaatgccaagtccagccccctggcccctgacccaggagggagctgagttcccctgcagtcttagggggatcctcccatccccactacttctctgtctccatcccacctgcaaccactgctggtgtctctactcttctcctttttaagggtattcctctcagttatgtgggtccttccactacctcacgtcctccaggaagccctccctaacctcaccccgagaactcaccagaccccatgtctcgccacatgctgtcgtagatggttctttgagtagacatagcaattttgccgctagattttaagatccccaagggcgggaaccatatgttatgttgctttgtggctacctgagccccgacacgtaacaaatacaccagagtttgatcagattttaggattgcaaaggaagactccaaagctggtatgtggctctacccagatctcaggggagaggccagcctgagaagcaatattcttcattcgttagctcaaacgtggttttcaatgaatcaagaataaactatgatggatgaggaagccaccatcggccagcttgccaactggtgctgagcctccagcgccccatcttctgccccagcaagctccccagtaggttcctggctaagaaacttgggaaaccccagtaggcaggcttgcatggagggcctgtagccagaagtagagaggtacgctgggcaggggaagggcctgcactggagccaacagggtggcggcccacatgcagctcaggccactgaggcatgttcattgtcctagggaagctcccgacaacttggagtcctggggtcactactcagtttcatgcccaggccttgaagtgaaacacttcattcagaaagtttaggagaagagaaattggcttgttcaagaggattttgctaccaggggctgcggctcacgcttgtaatcccagcgctctgagaggccaaggtagaaggattgcttcagcccaggagttcaagaccagcatgggcaacatagcaaaactcctgtctctacaaaaatttaaaaaaaaaaaaaaaattagccagtcatgatgtcacgagcctgtagtcctcgctacttgggacgctgaggtgggaggatcacctgagccctggaggtcaaggttgcatgaactgtgatcatgccactgcactccagcctgggtaacagagcaaaaaccaaaaccctgactctaagaaataataataattattattattattatttaacaaaaaaaaggaggtttttgtcatcagctgcaagtcacccccattgacggccaaagtaatggagaaagcagccctttccaccagtcccaagatggactttgacgaattaaaatgcccaatcctttgcattttctcagctattcctactagattattttaaatagcagtgaggaagttcttctagaagagcgcagatgggtcagtctcttggagtgaagagcataggggcgagacgggggttcgggccctggtcctggatgggctttctgctcaacctctcccaagggggaaaggctcccctagggttgctgtgaggatcaagggtgagcatgtgtgcccccagcaggtgggggccactcagtgtttgttaaatctgagtaccatggtgacttgggatgaagggagggagggaaggagggagggataatgatggtgctaaattgagtatcactatacctttactccaccttcactccagccctgagagtggaaggaaagccagaagcctagaggtgtgggacagcatgggataatggaggcaggcccattccctgggaaggcacctcccgaagatcagcgcaccccatcctcacagctaccatgtgcatagctgttgtgaggtccgtttgattgataagataacagaggggcagagaagttaagtgacttgtccaagaccacccagctagaccaaggcaaaaccagcatatgaacccaagggtgtccagctttcaagtttttaccacatcaggctttctctccagatgagaacttcttagagggctgctgaggtccaggagggcttcctggatgaggtgctggttgcagaatgggcaacagctaactagtgaggtatagggcactgcagtttctaactgttggtcagtgatcagacacctcccatgacaggaagctcaccatgtccccagacagacccctctgttgcggggcagccctccccatgagaaagttccttcattaagtgagcccaggctgcatctctgcatctctgagccttccctccactggccccttctccccagccctcttttattagacaggctccatgattggtcgcacctgggattttaaataacttttaggcgactttctgtccatgtgccttcctcttggtcctagcttttctagtttaagggctgttccaccacaccaaggtggtaagattaaaacaggcaaggaaagagtgacttccgggagagcaacttccaggtcaatcaactcgtagggtgagtgagacagcagagggccagctaaggcccatcagccagggtgccgaggccagctgtggtggattcgaatggccaggctttgggctggggataaaggaagtcactgaaggtggaccccaagctgcgaggaccccatcacagtatttccctcgggatgatggtagtgaatgttgggtgatgaagactttcatggtgggaaactatgcccaaagctcagcccttagagcccaaaatcagaacagaagccaggcatcctgaggtctcttccttgacctaacatttgaaacagcccctgtcttcccatctgtactatgggtgcacagtgtgatccctccctctgcatagctggaggattcatgctctgttgcttggaaaacccatggcataataatattacaaacaaacactaatatagcacttgtatcaagtcctttaaaactcacaagaaccctatgagatgggtgttctatttgttcccattttataggggaagaagctaaggcacagagcagttaaggaacttgcccaaagttgcacagctaaaagtgtagcgtcaggatttgaactctggggatctggctccaaagtccacacttcaaactaccacgaactactgtgaagctcgggggatgcccagagccaccagcaggctgtagtgagggtccatgggccggatctgggagactgcagggcttggcaggccgagcggaagggcgagggccttcccctggaaacactccaccaggttcacgcggagcctggcgactccccagggcagccgcgtgctcttcccatgacatcacactgcctcagaacttttgaggctgaggattcttggaatgctggattcaccctggaacaaaaataatacctcgtattcataacgtgcttttgttccccacaggctttcctgggcttcatttcattgtagcctcagactagccttgtgatccaggcaggagtcctgtaggtgggaggccaccctaagaacctgagtcggggttggtctccccattctgcaggtgggcatactgagccacggggagttgagtggttggccaaagctgcacagcaaactggttctgggcaatgtgggccaagagccctggatttccagtggggttgaggggaggcctcagaaatgggtccgcagttgagtgaagctcagaaccccatagagtatccccaagaaagcctttttcccttggccttctgtgctgccgcaagatggaggaaggtggcaggagtctgcacgctttcctcccttccccacgaggcagcaatgaagccagaggggccacccgaaaaacaatccccgagccctgccccacaggccccagccacaggaaccagcagactgtggtgggaaagggctgttcccagcacagatggaaaccaagggctgcagtggcttctgtggttttcccgagacgcagtggagccaaggctggctggccggatctccaaccctcccatccagagccctcccaggctctcccctcaccagccccggcctccccattcccagcgggccctggctcagccctccgcctttgcttctgcaccacacgctgccataggacagcccacagctccctccttgctgactttggctgaggcctgtggtcctctgaatttgggtttagtggctcagcaatggtgtgcaagctgccctacactctcagaacactcagtgtggtggctgagggcacacattcggggccaaactatataagttcaaacccaggctctgcttggtgcaagttgtgtgtccttgggcaagtttcttaccctttctgtgccttgaagacctctctggaaaatggagtgaacaatagttcctctcttggggttgaacgaaagccatgcctggcttactgtaactgcttcctacatgctagctatgaaccattcttctgcatccctgtgatgtgagtttgagtcctgtggcctcaggaccaccctcagagtgtgtgaactgcccgagtccagggcctgcgtttggtttatgctccaatatggctgtcttgactttctcaatagcttttgaaccaggggcccacattttcatcttgcactgggttccgctcattatgtggccagtcctgcctccaggccagagtagaacataggcctgtgctgctctctgcttcctttccttcgtgattcttgtcctgggataaagctagagacctgtttctgtaactaatagattcacatctgtctctccaaatggaccctcagcttcatgaaggcagcagccctgtgcgctggagtcatcgctacctcccctccccagaccacaaggaagatagagagaaggttctgcctcatctgaaggaagtggatgctttgggagcagttcagaggcacacacaagacactctggtggcagagacgtgggtgtgatgtagggcattccagactgtaatcatatcaggagtctggagggctcgggcaggaccctgggagctggggaaggctcctgctcaggtctggaccttaagacctggataggattaggggagtgctgaaggactctgtagggacagctgaacagctttgtcacacaaacaccctgcctccaccccaacttctctcagagggctgcaggagctatgtggcctcaggcaaacccactgacatctctgattaacctctgggcagaacagagtctcagcatgtgtttaattaatgaaacaataatgaaccagcctttctctgcatcatttattattcattcattcattcattcattcattcattcattcattctacagttagtgagaaaagtctttgcctgtagggtgcagaggtaccaatcagacctttcatctattccagagcatcgtttggcgaggtaaacatctgatttctaaagcttttagtccatgcagtgagctaccacacttcttacatgaacttttgcctaggctggcaaagacctcaatcttgaattgttttctacccaactctgagcaaagagagccacaaaatctattggagtgggagagtctgcagcttggctggccgcccacggtggcaggagtgtttctgatgcatgctggccctctcctctcagcgttgttaggagggagtgctcaggaagtagctggcccagtgctgctgttgccgccatcatgataatgatggctctggcaattacagggcccgtgtgttgcctaagctttgtagcgatgcccccagttctccaaagagcactgagatctccaataagtaattgttaaatccagtcatatggcgtgttacagcaaaaacacaaatctgagttccagtgagggctttgccactaactagcggggcgaccctagaaggacaaagcaacctctctggaccttggttttctcatccgtcatgctgtgactcatgtaatccttacaactgcccctcaggtggggactggcacatctggaaacagagacacagagaggtgagatcacccagcccatgcaactgtgagtggcacagtgccaggctctgtgcaggctgccataccccagacagacctggcaaggagtgtcctgcgggggacacccatcatccgaatcagccctgcgcgcaccatgggtgctccgttagtataggtcactgtgatccttgtctctgagtgttcatcagccaataccatgatgtcccttggttgactccctcatgagggaagaaaacctcccctcccttatacttttcctttttaagcttccccatcattctgcaaactggggtgggtgtgtgtggcgacttttgttcctgggtcctatatgccatcgctcgactaagcagcccctgagctgcagagaaattgctggtgcctgtgcctccgagcctcaccgcaacccttgcgttgtcccaggtgactgggccagggcaggcagagctcactcagggcatgtgtaggtgggcaggagtggaggtgcctacgctggtaataagcagtcatcacttttcctgaaggcaagaaatatgagcccatgcatagttttaaaaccacttgccctaggaattttgctttcagaaatttttaagcagacctacaaattatgtggtaaaatgtccgacatggagagaaccataataagtcagtggcactcagaatatctagttgggaacgattatgaaataaaaaacgaacagagggacatttgtctccatttggactgctgttaaaaccatttttttaaacaaaatttgaagttattctccctacacccacctcccaaaatgcagctgtggtgttccgagaacatttttgtctttttgtataaaagagagcagtcttagagtaaaacaagacatctgatttcagaacccaaagaataaagaataaactaaatgaacgatggaaaaagcataaaccgacaatttccattctccaaaaaaaaaaagcattattttcctaacagcaggtgttgccagtagcacaaatggaatattaatcttatctcctgtgctgttcttcctcacccgaagaagacttccccagaaataaagaggcagagagttgggtttttgcccttcttacttgcagggctgcaaaactgggtgtccagtatgtttcccaacccaggacccacatgtccatgtgtctgagaccaagtgcagcctccttgccgggttgctgggagcaaaagcggctcatccctggcccagccaaaccccaaacccgcaggtttcgtggggagcagccagctggcccctgaatgaaggtatcgacgaaacccagcgccagcaaatacagaagagagaggagctggttttggctggcccagccaacgaccgctgacaaatatttgtgaatggccagagcagggaagcctaggtctccattgctggggaacgaggcctaactccaagtctgttccagtgcccttagcagccctcttggctccttctcaggcaaagaatttggacctcatgcagttatcaccaccgaggtctcagtggccattcagccctttgtctccattactacaggtcactgcggtccttgtccctgagtgttcatcagccaaggaggctgtgtctaaaggcgaatgggagacagatgggaggtggctgcaaggtgctgtgattagttgacaggcttagctcactcctggagcccctggcaggccctctgctgtaggagtgcacctcacggagcctcggttgtcttatctgtcgaatggaaagaaaggttcttggcctgcctgcacacagaggccagtcccagcaatcactcaccctgagaactaagcaaggccttgtgcaggaagaaggaaaagggaggacagagggacagtcttagtgcctcttcctccagtggcatctgggttcttccctgccctcccagggctcacccagctgattccatctgccatttagctccatatcaagacctccttattttgaacctgttagtctttcctacccaattaggagggaacacttgaggtggactccctggcttccctcccacctacggatggctttccacatgtgcaaaggagccgccgcccagcaagggtgagcctgagaacgcccactaatgccaagtggcctggggcattcttggccattgccatattgtcagggctggctggctccaagctctttcgaaccaggaagacatggaattccaggtccctccagatttccaggaatgaacagcagaagccctgcaggagccagctgatttctttctggagcccctgaccactagccatatagcaattacttccttccccctccaggtagatagaagttgttttcttttctgggggtggaggagtgcactgggtagagagagggaaatccctgtatggcaagtgggaaaccaggcagtttcaagacggatgttgggaagggcttggtcaaccatcctttggggacatttcttgggccatagctgcaggcgccacaaaaattctaaataaggatgacgaaagttgtgagaatcaattattatctgccagggaatttccaaggttcctctctgggcttaaaaataactcacattgaaagaacaaagagaatggaaggagcaattagttgaaagtaactgagaagttaaaggagggagaattcacaaaaagtcacaggcacgaggcaccctggagagtggtctgtgggccacagtttcttctgggctttccaatgggggttgccttacactctgcagaatgagggctgcagccctccccgctgactcaggcatttggggctgggctgggctgggtagtcggaaggccagttggtggtagaatcactgggaggaacctgactcaagggccccacttttctcatggggcccaactcttctccaggtgctggtgctgatagctcctacctgccatggggagtgaaactgaatatttcagcaatgccagtgaggaggggggtgtgtttgggaatggaggggctgcctctcccacccaagtgtcaaggcaacagtgcttttgcccaggaatgtatatcagaaaccaacaagattgaacttggacaccaaggatgaaaaatgccacacaggcctcctgagaagggcccagggtatgcctagtcagcaggattcagttcagggtaccagatttttacagatattttaataatgactcttaaattattgaaataaatatagacaaccccaaaccttggacactgtatataaaaagaaacctaagaagactctgaaaggtagaaagaagacagacaggccagggaccttgggaactgaagaatgacacactggtgagttcctggggttttcctcttggctcagatatcccagacttggagctaaagaaactggagacccagaaacaccatgaggcctgagcagacaaacggagccccaacaaaagtccactctttctagccagaggaccagggaaggggcagcctagcaagacagaaaactcgagacagtagctactttcctccagccaaacacctctgcaggaactgtagccacacccccacccaccactccagcggaggcccaatgaggggcctagacagtgacaaggtacccagcaccccaacagggtggtgtcaaagggactgtcatccccattggggataatgagctactaagcttttcaatggaggcttttcagtgaaaaaaaaaattttattcattttagtggaaaaaaataatgcatttaaccccaacccaggataccctcaatttttcacagataaaaatgtatcaagtaaatattaaaattgaatttatataagtaataagcaataagttgtaagtaaataaatacaatttgttcataacatgcaatgcaatgaaggtctgtggtacccaagataggtcacggaggaggtgcagcgcttattctttagaagctaacattatctttctgcaaaatctttccactattttacaacctttgcggaattcatgcttatcttgtgctccaactgcacttccagtaaagttgtggcatggaaaacaccctgagggtaaaatggagtttgaacatagtagtgctttcagtggcaggaagcagcctttgagccagccagaagggtcatgagaatgtccctcaccaccccttcacttgccttttggccacaactcaaaagtttggggtttgttcctgctgcacaactcacacctgttccctgtgcttagaaagtgttgtcagatgagcctgtcttgacctacacccatcatgttaaatattccttctgtatctgtttgctaggttgctgtaacagagtaccactgactgggctgcataaacaagaggcattttattttctgacacttctggaggctggaagtccaagatgaaggtgtcggtggggttggtttcttctgaggcctgtctccttggtttgcagatggtcaccttcttgctgtgtctccatgtggtctttcttctgggcatgcagcctccctggtgtctctgtgtgtcaaaggttcctcttgttataaggccattagtcagttcagattagggcccatcctaacagcctcgtttaatttaatcacctctttaaaggtgatccatcatgtcttatctccaaatacagtcacattctgaagtattgggggttaaggcttcaacatatgaagttttgcggggtggatgggggacacaatttagcccatgaaaacttgttatagcatatgtagtttgtgggtttgggggtgaaaatgacaatgttccaaaaaaaaaaaagttgtttgaaagggatataacttttcaaaaaacattatggtgaacagtcattcataggaaggtgcttgtaagaagcaggtctgcgtatgcatctttgctggtacatgcatagaatatgtctggaagattcacacacgtggaacggctgcttccaaaggccatatgtgatgacagagtcagaggcaggagggttcactgttatctgctactggatctttttaattttgttccacatgcttgcattcacacatattctagtaagcgaataaagtactgattttaaggaaagaattggctttggtcctctgcagtagcaaggaccggtctgcctgttctcggctgtatccccaggggctgtcacagactctggcacgtagaaggtgctcaggaagtgtttgttggaagaatgaatatatggacaaggcaatgacttcctgttctggcggctgggcacagggactctgaccagcccgcccagtgatcgccttctctgtctttcctcttccgtttgcaggcggcagcagagacctccggggggcaacaagccccaacagcatggtgaccaccagccaggcagtgccaaacacaacagggaccaccagaaatcctaccaggggggctcagcaccccacccctcagggaggcccactcaccatggctacagccagaaccggcgctggcaccatggcaacatgaagcacccaccaggcgacaagggggaggcaggcgcacaccgcaatgccaaagagaccatgaccatcgagaacccaaaactggaggacactgcaggggacaccgggcacagcagccttgaggccccccgcagccctgacaccctggccccggtggcttctgagcggctgcccccacagcagtcaggggggccagaggttgagacaaaacgtaaagacagtattcttcccgagcgcatcggggagcggcccaaaattaccctgctccagtcttccaaagacagactgcggcgaaggctaaaggaaaaggtaccggtaattgaatttttgttcttctcttgcaccagggaggacagcaagaggtaggcacttcggtaggtgggcacagtgcagagccttgtgggtttgagggtctagggagccatgtacagggaagcaggggcttcggtcactgtggggaccaaccacactggtccaccactgccagcaggtagggccatcatgaacccctccagcacacttgggcttttcaccttccaaactccaagaggcccagggtgggcacttggaaccagcccccagcccaagggagtagggggaagagatgcatgcctgggagtgatgggggaggtgcagggagcatattctagggttagatattgtttgtgctgaagagcacttggggaaacatggagcttatgaaataagaactgaagcttttctacaggtgagtaccatccaggcagtggtctctgccagaatggggagcagaggtgagttgttcagagtgggggcaggctgattccagccttcctgtttcccgccttcatcacccagaggccagggagtgctctacagtgcacaccgtaaggtggctccattctcagcatcacgcaggtgcctacctgtgccagcatgaacccgagagtgaggcctccttacttttgctcccaggaggctctttctgcaccctggtcctggcctggcctgtagcttcaggagatgaccctaaacctccagaagagggatggggatttgtacttgcagcagtaagtccattgtgctcaccccagtgccaccacccccgaccccactgcccagcaggggcacaggaaaggtcaccctggagaggaactgtcccaagaaaggccaacttgcccacagccattcccacacagcagcagggcctacagaggcttcctcctggggcttccgcagagctccatgttctgggcttctcctccatcctcccctactgccgactctcctcaagctcttgccccagaggccaggcccagggtccacactcaggcaggataaggcaggtcagacctcttcttggatccactcttgaagatgagatgctgctcccagtatcctctccaccgagtcctctagagttctgctaaatgtaactgcagggcagcagagtggaaacagcacgggctttagagcgcagctgagcaggctcagacctcactttgcctttgactggatgggtggtcttgggcaagtcacctaatctccctgagccccagttactcatctgtaaaatgggtgttaatactacacaccttgctgagagactgtgaaggttaaatgaaataacgtgtacagatatgttcttgtgggtattcctattctatatgcagaccactgttcctgccctggggcccagatggtcggaagagaggggtacatgggggaatggaacagagaaggtagatctatagcacctatagatcagtttcaaggactccactcaggtgaggcctcctgaactcctggaccaagaagacatgggctcaggctcaggctgggtcactccccactctgctagttgctcactctaaaaaagggtaaatcctaggtggccaaccagccacatcctaaacattttcatcagggagagcaacactttccttctctctttcaagagacaggtaaagcgtgagatgtctcttggggtggggatttgtgtcctgttaactttacccagggactcagagtagccttccctgaagaggtggttgggtttgaggagaagaactaggccaccctattccttcacccaggattcagccctttcttttttttttttttttttttgagatggagtctcgctctgtcacccaggctggagtgcagtggcccaatctcggctcactgcaagctccgcctcccgggttcatgccattctcctgcctcagcctcctgagtgtttggttctcaagccagagactagctgcccttggaacttgatcccaccatggaagggctcaaggaaagctatagattttctcgtctaacctcactgtgttacctatgaggaaactgaggcccagagagtgaaatcacttacccaaagccacacagctagaggcagagagtgggatctagagccttggtctgtgccttctaggccagagcttctattgtcagggacagaagaccaagcttggatctcatttcatgaccctgaccctgcccttccagccagatctcacttccttgcagttaagttgttcccattcttggccaccaagaatgagtcaatacaataagatgacatttttttcttcttcaagcccctggtctggtcctagttgcagtgaaatctcataaggctgtagggctttttacttgtaatatccctcctagaagcccaactgttttagtggcacatgggaggattccttggtgtgtggcatatgtctacagaagaccagcacagtctccacaggacaaaaagccagggctgtgcccacagggggccctatgcccagagaacaagtcatcattgggcatttggagctgagggtgtaggggacaaggtggccactgcctgggccgcttttaaccaccactgcaggcattttggatctgacctgccttcctgaccaagtcttcctaccctcattttctctttggcccgatttcatatttgttatcttatttcctctttcataatttccattaaatcttttctagattaagatatttgatggacaaataaacaaaaaaagccaatgtatatgagaatcctgggtaggagctagaacccaaaaacagtatcagccctggatgtcataggggccaagaaaaaaggcaacaaggagcttttggcgcatgaggggtctttggtggaggttcccagagggaccagccctcagatccagggaagtaggcctggtcctgctttctgggggtggccaccctctttccaccaggccacccctgcacagagacctcggcttcactcaggcacattcatttgtctccgacacccccaggatgaagtggccgtggagacgaccactccccagcagaacaagatggacaagctgatcgagatcctgaacagcatgcggaacaacagcagcgacgtggacaccaagctcaccaccttcatggaggaggcccagaactccaccaactccgaggagatgctgggcgagatcgtgcgcacaatctaccagaaggctgtgtccgaccgcagcttcgccttcaccgctgccaagctctgcgacaagatggcgctctttatggtggaggggaccaagttccggagcctgctcctcaacatgctgcaggtaactggacgccggccaccaccgccccgcgccccctgcccctctgcgttcggtgagttattcctagcgagaaggctgcgagttctggccacagttggacttttcccaagttccgcccttgcccgattaattatagaaaacacaaaggcagttaaggggccaggaatgagcggctggatttgtgtgtgtttatgtgtgggctccctggttacaatggaccaatataattttataggtgctttatgtttaaccagcctttcccactttctattttcataagaggctggctcttggtctcaacctggctatgtgctttgacctctctacatccaagcagacatgaacttgctgtggacttctcttttcctcctccttccacccagggctaggtccttagacctttgcagatatgcagttgatcatcactggtagtgagatgggtttgagtaaagccacacatgagcagaaaagggatagtctgtttaccaacacactatggctcctgggcagagggaagtcacggtgatgcaagactgtcttcatccttgctctttccctcttaatatcccttcacctctgacagtgtaaccccacccctgatcattgcttcctccatgaaggcccacgtccagtggttctatcagcatgagtgtgtcgtgggagtaggcgcgtgcacttggacggagcttagcaatgtttcatctcacaagtacctgcttgcctgtatgggcagtagcagatgagctggtggccccaaaactggtgacgtcagggagagatagcagggtcatgggatggtggccacatcaggtcctgggactgtccttggagactcttggctgggggagagccatgtctcctttcctcctattttgtattttagagactagttaagatacaaagtgagtttctggtccagatgagataaaatggtagtttccaagtaatgaagtagaatggcaggctatagggccatcttaactagggtgaccatacaatagatcatccaaactgcaacacttgtgaaagtcaaagggggttcagttcataattatgcctagacaacaggtgtaaacaagggcatatggccaccctcaccttaaccatgtggttcgcagtctgccgtcttccctaaaagctgggaggaagttgccgctaaggccacctctacatgcagccggcagggctccatccccacccaccctctcctctgcatgtgagttgcactcactgcaacatgagccctccctggccagcctgggctgcttctctcctgctccaggccctgatcaggttcccattcctggatcgcccgcactcccctggtgacgaattcccgcattacctgagggatttgcacatggggcatgttcctcgcgggccggaatgtcctgggagcgtgtggagagtggcgggcagagaagcctgtctgccagagagcacccggcacaggggagtcagggacagcatcagcctatggtctcggctttgggttttgtttttcaaaaaagggccaggatggggcaagagttctagacagtggttgccagctccaagtaacccagccagacccggtggcagacaggcacccagggcatggggcacttggggagggcagctggctgcaggggccatctcagatcgggtatttcttccaacctgccgtggtaagggtggcctcacccacaagtgtccagcggaccatcaatcctggggaacagtcagccacaaagggggccctatggcccctgcactcacctctcaatcaaccacaacgtgcactggtttaggacaggctccagatgtcccagcaggaagggaacctgtttggctccgtttaactcaacaaagtcctctgcattccccagttaagaactacttgtgggattagtgtgctgagagacagtttggcaaacactacagcagggaagaaaacacaaaattgaaagctgggaagcaaggattccagacctgattcgtttgtcatccgttggagcttggcctctatagttccctgggaaagtgcaagcaacagccttcatcagtgtaccctcgattttgcactactggagatgagccggggtctcgggcaggggcacgagggaccccgtgtgagcctttccctttctcatgctcctgaggccttgccactagtaggaaactgtcctgggtccccctgagtcctcacaaacccactcaccccatatagtggctccatagtaggtctgtcatgagtgatgcaggctttgggaccagcccaagagacctagttctgcaggtgccaccttgtctctggagcagagaactggcactccacatcctgctccccaccccccatcagccaggctgaacctcccagtacaccctgcatggacgaactctcccccagaattcacttctctgtcccactctgagcatgcacctccccctgaagcatctcacactcctacttcaggtggtgctagggccccactttccaggaaacactggcccttctcctgtcccagcacctctcatcctgcagccacaatgttcagtcaccctcctagtattcactgagtatttctagtgtgccaggcaccagcctggggactgaggatacagcagtcagtcactgggcacagctttgtccttaaaaggtttgcagtgaaggagttgaacttaaaccaatggccacatgaatccacagtgacaaactggggtgcgtgccgttactgccccccatcttgggctctgggaggtgggaacccctctactttctgcacctctgtatcccaggggctgcatagtgcctggtgctggagggccctcggtcgtcaaggagaaatggatgtctgaaaaggaaggcgctggaagcctcccttctcccgggctaggggcctgcagggacagctgaagtccagggcaagaagggaaccccccacccaaggcagtcatggctcacattctgaggtttcagagcagctcctcctctcctcccccacagtggaggaagccagccatttgcctgggtggagtatctgcgggtcaggtctttagaaatctaaatgtccacataggccaccactcacccctgtttaccacctgcagtcccagctttcatgtgagccgaggagggagccccttgagagtataaccagaggcttgatctgcgttctcagacctcctgggtggctagacaaggccctttcagctgccatgggaaggcgggtggactgtgctggtgcggggctgccctgatcccacaatggccccctgactccaaggcccagaggacacctgaaccacatctggctgagcctcctcaggccctgtgccttctctctgcagccaaggagacagaggtggagtgggcttttctggacagcataattcatggcccctcaccacccaaacccgagaggtgcaagaaaagaaagcgatgggctgggctcagcaaaacctgctttccctcttaacacctccagggatgtcttttttcacctgacttcattttctggcaaactatgtttgcatcccttcctggcaggcagttctagacccggcctgcacagccctgccccctgcttcctccctgaggtttgcactcagctccatccactcaaggcccatctggctctcggtccccaaccagcacctggttgggtttggcagcctccgagatgcccccataggatcaggttcagctaccacttccacacacaagttctgggccccggcttagcaatgcaggctacaaaggggccagggtgtgaagtgcctccttagcacagctcccagcagtggtctttacacttggttctccctggctgacttctcttgctgccagggcttcagtgatgggagccggcagcatggagggagaggggcaaccgcagatgtggtaaacattctgcggcagaggtctgagggctcttgccaagctggggtgcagcccccatggagtgggaagtgcagggtgggagaagggagaaggtttaaggtcctttaacccttcccagccagactcaacactgctatctcaaggaacccagaagcaccattctcatgagccatgacagtgctggagaccttggggtctcagaggaccccgtcaccaatcccacagctccaaaatggtcttcagtttttacatccaagccaattcctttttacctgaaatgtggcccttttattagtagtgtccttgtaagtaaaattctatttattaaacagacatttctttttttttttactttttattttattttattttttaatcattttttcttttttttatatactttaagttttagggtacatgtgcacaacatgcaggttagttacatatgtatacatgtgccatgttggtgtgctgcacccattaactcgtcatttaacattaggtatatctcctaatgctatccctcccccctccccccaccccacaacaaaacagacatttcttaatgtgccaagcatgttgtctttattaggtcaggggttctcaaaccggaatgtgcatatgaatcacgtgggattttgtttaaatgcagattctgatgcaagaggcctgggatgggcttgagattctgcgtttcaaacatgctcctggtagatgctagtgctctagtccagggaccacagtgggaagtcacaaggcattgaatgactgatggtttgtaggtggtggctctgtttcatagatgggcaaactaaggcacagtctgtcatcagtgtgatggtcagagtggaggtctggcctgggaatattgcatttcagatactggctcttctttaggtcagtggttctcagcctcgctatgcatgagaatcatgagaacacagcaggcagggggcctacccctaatcagttgaattagattctccaaggacgcaacctgggcattcgttagccagggtggaacaccactgttgaggagacaccccagagacaccgaactggttcatcgcggccacttatgaatcagctggctctgcctgtcatgccgcgaaccagtcaagaaatacctgccaggtgttgggctctctgctgagccatgggggaaaactccgagtctgagctggcaggagaaccccattacacaggaggcctcagctgctgagaacatgccttccactcccccagcctcaggctcttcttgtcatcaccctgaacctcctccttgatgagatgaaagccacctcttctctcccgctgcctccatttctctctgtcctcagctccttttcccattttccttttccttggcctgggatgtgtgtcggaacagctatcacatgttttaggaaaagggcctcattctcacccacggtgccaggctgtaccagaggctgggccacacttcgcagttcagcctgtctccccatacaccttcccaccaaggttcccaacttctctggctttgcagggtcctgactgcagactagactgactaactagatgatgtgcattgattgtttccgacttccaggagaatgtggggtgcccagggtgcctgggttagagaaggaaccaaaagtttccttggatcctcatcagggaattgtggtgtgatacagggcggtgaaggggctccagtttcacagagaagtgaagaacgagtgtgcctctttttatgggacctttggaatgacaggaatggaagcctgagccctctccacccagcactgccctgtcactgccccgggacgtccacgtgggctctgggaatgctcctttgctgagacaggcttgggtagtacaagttcaagccctcctctgttgaaatgtgtgtgctctgtttagccaagaggtgtctgcatccgagctatgcagagcaaagtattattagagccggcatcagtgtgtctgtaactgaacccagctctccctagcaaccgttgccaacaacacatctaacagaaggatgcgatacctttttttgaaaaaaaaaagtttgtctcaaccaagtcataaacacagcaggcctgttgtgaaaagacaacacaaaatcagaatctggtgtgtgaccagatttcaaaataaattgctcttctctagcaccttctagaagacagcctgttaaaaagctgaccttgagctaaagagcggagaaactcttcagagtttctggctgggtcatcatcaagcattgtgttttgggcttttcatacatagacgctcagttgagtggtgactctgtgggatctctgggaatgactttagcacagaaggggcactcaagattttctggcttggctttccttatcagtgaatctctcaagtgtgagacaagcctgaagatgtatcttacccatacctcatcctggatgtgtgtgttgcccccacttctacccgtttctcccatcctcctgcccttctccttgtcccatgttttcaggcttgggaagaaaactgggccattcctctaactctcttcctaaggggaaaacctcgttctcttgtgattctctcaaggtctctggaaaatcaagtcattcccctttgtcagaagtttgaagttcctaactcttatcttttacataggaagggaggagggagactgatatcgattcctggagtctaagttttaaactcctagatggccagaatcctggctgagttatcggctgtccccagctcctggcttcatggttcatagtagatgctcaggaaatggctgtggaagggaggcatggagccatcagtcatgggtaccaatgctctctggggcatgaggggctttgaaactcttctgagcactttcctgtgtgtgaatcggaggtaggttccagggcagggatccctccccaggcttatacatggggaaagtggctcagtgaggctgcaaggttcacccagcatcacgaggctagctggagcttctggatgccatgccacatcctaaatagggtgtaaggctcaaaaacttgggaaaatcaagaatccatatcatggttgggagcaatggctcatgcctgtaatcccagcactttgcaaggccaaggcaggaggattgcttgaggccaggagtttgagaccagcctgggcaacataaaaagaccccatctttgaaaaaaaaaataggcaggtgtggcagcattgctactgaagccccagctactccagaggctgaggcaggaggatccattcaggccaggagtcaaggctgcagagagctaggtccctgctgttgcgctccagtgtgagcgacagagtgagactctaaaaaacaaaaaagaatccatctcaggaagtcatcaattgggatttcaaaatccaccctgtggaataatcccactgtgtttccaggggtcgctgagtctctgagctttctgggcctctggaggtcaagggtacctgaagaaacccctgcactctccattcgccctagtccctgtgaaaccacacaggctgctggccccagttcccatctcctccttgcatcctctccctcttctcagaccccctccctcatttctgcacacccaccgctgagccgatgtgcactccaggcatgtaaactaattttaatgttggcccaagccaggcacacccagggatagaagcacattgttctgtgcattccaaagcttgagcaaaagccctggccatacccacatcgagctcccctccactagttgctagaaatcagaaaggctgaagcaaagggccagaggcagtgcaagccgctttccccgtgggcaggctgcacggaagcttgcaaaagcccagaaaagggctgtttttctaaaaatggctggcatctgagctcccgccctgccccctgtgggccatctgtccccatgctgaagcccgtgccctgcaagggacatgcagagttggcacacacatttccctgaaggtgggcaccaacaggcctcgtcaggctggcctggcatcacaggaggccagcagtcacaggagcttgacccctgcccaggattctgtggcagccctgggctcccccaacaggaagagccaatgcctgactcctatccatgttctttgcccctgcggccagagccacagtggataggagccgtgtgcctcgttgccaatcttgttgtctgcacttgctttgggatgagtaaatatgacctgcttttctccaatctttatttcttctcaacgcttattgagcacctgctatataccatgcactgtggcaggtcctgtatgtctctgttcatttgccctccactgtggtctttcaatctgtttgtgcaaatcttaagcattgcattcaaggacccaggtgggatacctcaatgtcagtgcttagaccagatcgccctgactgttcagtttgggtggggcgggggaacatgtggcttccaggagtgctaagcctgtggttctctctggagctttgaagtgctcagtgagacagagcagccgatgaccggatcataaacaagcattttgatttttgaatctgaaaataagcgaggaaagaaaatgaccactgatcctcagccagtcctggaaagtgcccagaacagcagcatgccaggtgtccagtcatcatatcatcaggggggcctgggtgctgctgctgtgccaactactgccccaggcccccagggaccagtgagcttcctgcaaaaccaagtgcccagcttcctgcctctttgccactgcgccactgtgccactgcgccactgcgccactactgtgttcttcaaaatcacagagagccccgctcctgagaaagcccaaagtgcctttctgtgcacggcatgggcttttacaagtctcatgggcagtctactgcaggccttgtcagagactctagatgtgcagaggctgagggagccttggacaaaagtcactcctttcccgtgaaaagtggccattgccctgtgttgttaggagcgtgggtggctcaggaggggagagcaagaccagcctgcagcttcatgaatcaggtcagctgggccatctggagcagacaggtgtgggtcgtgcccccgaatctcatttctctagacaggatttcttgccctgaggcagcaacgctgaggcctgaggagtagcaaacctgtgcagtagcatcgattgctgcctcgatgctgatcttgagcatttaaaacatgtctctgcacccacgtttccgtcctgcaagggatgattgggttgtggtagagcttaaatgaggtaatgcatgcacggaccccagctctgagccacaccactcggatggctccatcagtgtgggtgccctgccctggtgggatgaactgggaggcccttctaactttatcccatcctagattcccaaagaccaccccatgcctcagtcttgggcagcatttccatttcccccccctacgctgattaaatgtggaacaatgagggcaggcaatgagtgcttttagactattgtcttcctgggcggtgggcccaggattgacaggtgtactcttcctcctagtcaaatctgcctcctccaggaaaccttccctgatctcccagcccagggacctcaccttcctctgactcttgaacatttaccatgtgtccctttcatgaagtcttctgggctcccctgtttaagcttttcttatctgagacttgtatctgtggatgtcttggggcaaagaatgcgtctgggtcatctttgtgtcccaccaccatactggtacccacaaggtattcatcaggcatcagctggctggctccaggagcttccttcactggggaggaaggagcatggataggcaggcgtgggaatagcacaggccacagccacaaaagggaatggcctggggttttctccctctcgcttctgggccaggagagctttacccaggtcaggaattatttcaccatcacccgtgtcccttgccagaccgtgtccccttccctgcatgccctcaccccccacccagggttcattttccctgctaaatcccctgatagaacttggccgggcactgccctgtctgaggctgccacgccgaagcaggccctgcagataagtgggttaccggagaaggccagctcgggtgtcccaggccccagagggtcacccctggctggctggcagctcacccccagcacctcctcctcctccttccccggagccaggcaggcaggagacagcagatccttccccccagctctgtgagcggccggcccccagccgccgcggggaatctgagctatgctaagcggctccagatcgcagcatctctgccctgcccgggcacggccggcccagacagggcgcctctacctgccgtggctgccgctggaaagctggcaccgcctgggctgatggaaaaaatctccctgcgggttatgtaactgctcaccgccctgtccctggctccccagggaggctcccagccactaccaagagagagcagtggcccctgggcaggaaggagaccacagagggtcactctttcaaaaggaagaaaatagtgttgcgttatctgaggtcctcctctggaaccagcctgtgcatggcgccaaggtgtttcctgaaaatgcttaaggagctcagaggcctgccccagtattatagcaagaagagagctaaacctagcgggagggagtggccacagaggaggaagagggcaggacagctttgttactgtttttcttttcttttctttttggcaaattattattgcagtaaaatataccataaaattcaccatctgaactagttttaagtgcacagttcagcagtaccccgcatacctacaatgttggacaatgcccatgaccatcccccggcaccccaccaaaccctctcatcaccccaaacaaaagccatgtacccaccataactcccctacagcaataactcccctacagcaataactcccctacagcaataactcccctacagcaataactcccctacagcaataactcccctacagcaataactcccctacagcaataactcccctccatcttccatctccatgaattcacccactctacaaatagcacacatgggatatcatacaatatttttctttttgtgcctggcttatttcacttcacatcatggtttccaggtttattcatgtgtcagaattcccttctttttcatggctgactaatattccattttatgtctataccacattttgtttatccatttatctgtcaatgggcacttgattttcttccaccttttgactattgtgattcatgctgataggagcatgcatgcacaaatatctgtttgagtccctgcttttgattctttggggtatatacctagaagtggaattgctggatcatatggaaattttatctttagctttttgagtatctgccaaactgtttccaggaagggtgtttttgatgggggaaatatcatgaaccaagagccaaagaaatgacacaactgagggacaataaggacactgccttactgaaattcagctgagagctggaggaagtctataagggggaccgactaagaggcagaaggatctggactttataaagtgggactcagggagccattgtgggttcttgagatgtagagttccaggatcaattaaaaatcatagaccagtgtagacttgcaggaaggatctatagatcatccagtccaaccccctcgtattacagttgagagacttgaggcctggagaggttgaaagaggccatgaagacatgttgataggtcataggatgttggacttaaagatgttttacatcagagaaccaggggttctaggtagccacgtggtctcttgtggagagggagcatatccaggcttaagcctgcccctcaaagacctgagctgtgatggcaggcctcatttccctgccctactctcaggatcctgctctctggcccctggcacatggaactgtggcatttccaccaccacccccaccagccagagccaggagctggggttgcctgccatggggaactgtgctcccctagcgctggtccccttccttcagtaagtgccatggtgggctccaagagcttctgggacaagtcagtgggcatcttcgaaccagagcccctgggtgagcaggcttccccaggggtacatagcctgcattccagagagggcccctaacattggcctgtgggccgctgataggaagaatggatagagactccgcacagggtgccccacccccggccctggtgcccctcaccatgctgctgtgggcttatctccttgttgcccttcgcccataccaacctgcctgagctgcgtttctgatgcctataatgaaccagaagggagttgaggggacagagggggagaggaacaggaagaggagatgacaggacaactctttcaacagccagcaggaatgccacacttggccttcaaccctccgctctaagagtatttatacccacagtgttcagggtggccaggttccaccttgtctagataaagagcaggcccccttacggagacagaggtctccccagctcccctccagacagccaccaagaggtcaggaacacacagagtgcacggcgcagtgcatggaagggaggcgctgttgcaggggcagccatcagtgcctgggttactctgaggccaatcggcatcatgtgagcaatttaaacccatggtgtgcccaaaggccagcttttcctacttctaggtcttccctctctgggcccctctgtccaggagaggcggatacactcgaccagaagcagaaccatgggcacagggagtctgcgtcatgctggctcagcatggctctgcccttgaaacccagagcctagaataaggggtccctgtacaccgccagagtgcctcactgcctcccacctagagctcaggtttaaaggccttcactcggtatcagggtgcagagctctgagtcttcagggaaaaacagcggcctctttgggggggacagggaggaacctgcagggaacgaccctcccttaaccctctgctggcccttccaggacagatcccaggtcccagagtgagagaagcttcaggccactttgaagtatgaggacaggcatgctcaaaatcgtcccccctccagcacccccttgacagtgccgagcctgagaccaagtgtattccagagaagtctgtatgcacccaggtcattcacacctagacccattaagcagagagggcttgggagccagcacgtcaccatgtcatgcccctgcctcccagttttccgtagagcaaaggccatacgaaagaagggggtagcttaggaggtatttggggaaagccagactccagctaaagctggtgaatagctataatcggaataagtgcattcttgagcagctgcgtattggagcgccacatattggacccatacttagcatggaccccattaggcaaccgtcattgcattattctgagtattaaaaaaaaaatgtggcaaggggagtaatatctctaaagtggggttcgaagcacagtcacctggaatcagccttccctgccatagacccttcctttaatgccttaccacctgtggcataagaaataactcaagcggccaagagccagccacctccccctggctctagttgtggcgccatgcaactggttgactctgggtggatctcaagcgtggcagccctacacttactcttctgttaaatggggtcataatacccatctcctcctcctgcctactgcactgacattatcattgttaaaatccactgaaatgcctgacttttacctgtgttcccttaagactcctcctccaggagaaacttgtgaatttcatagcagcatgtttttccttttccttttgatgattccattcattcaaggttcttaggggaggtcccaggcagggaaagcgccctgagatgcccacgcagagattcttccacaagtccaggggcccccggcacagtaggacttgaggtttgggtgcagcactgtagacagcccaggatccagccacaaggaaagctctccaaggggccctgggactggcctggaggccccacagggttccctgagctcagtactgtgaaaccccagtgaaacaggcactggcctctgcctgacacataaaggggggcagggccagctcagccagagggcagtttaggaacatcagaggaaggggcaagccctgtaagtggagtaggttgaggaaggcttcctggaggaggaagcatgaaggaagaggcaggatctgggtggaaggaagacaacaagaggatctgtaagtggcaggaccctttgagggactgggggttgcagaggaggattggggaaggaggtaccgccagcctggcggagggtgtcaatcagcaagcccagggctgaggctgcccagccgggccgtgaccccaggtcactgtaaccacactggcccgttcattttgctggcgcctgcttcttgccatttcaggccaagaccatattttcatccaaaactaaaacttctacctcaagaggcgtgagtttcctgccagccttgggccgtcttttgcaggtggcagagtgggctgctgaatctgcgaccctggccaggctccagggcctctgaaccctggggttttgctgaggcaggtggtgtggcaccaagggcctggcatctgaggccagaagatacccgccacccctccctggtgaggttactgccttgtaggagagggtagggatgcccacctccatatgcccccatgtgccccaaccagcccctctttgtgcaccagctgcttccagagctatatggagatgggcgcccaccgcccaaccaggcacagaggtgcagtgctcgctgtgggggagggggagcatgatgccacccccaggagctctgcaggagccagagcagggttgtgcaggaggctgccatggggcgggtctgcacagcaacacttgctgctttcacctcactcccctctgcagaagccccttttcctcccctccctcaagtggtggagcaggaggcagaaagtctgaagccagcccctcaactaatgtcaccgtctgagcctcagcatccccataggggaaacgagggcactgggtcgggtgtggtctgtgggtcaggtctccccagccaggcaccaggccctctccagcagagcctgtggcacctctgtctgcctcgcacagcccctcaagtgccttgagcctgtgaaggttgcaaggaggtctaggactagggagaggctggaacccactgcgggtgggaagagaagatgggagctgctctgtctgcaatctggcagttgtttatcccaaacagggaaccagaagctgaggatttaaaggctcggcgtgggaggaggtgctctgggctgcaggagatccggtggggagccccagccctgcctttccctggctgggcgacctcaggccaggccttctaccctgatggtggcttcctcacccataaaacatggagaggttagaagtcatttcagacattccttccagctttgttatcccaaagcagatgcgctaggcaaacagagggtgcctgctaaaatgcctgttgctgactgattggttagcgggttgaccagtgcagagcaggacccatccccaactctccccacccggcgggtctggccggctccttcccacccgcctggccccatttacagagtctggggcctgcttggcttgtgtgtgctggcggcagcacctgctgggtgggcagggcggcctgcagggggcaccagtgtgcaaggccagcccttcctgcctgcggccacctcccagcatcttggcatcctgggggctgtcccacagggaagatttaaactatatgatggtgaccgccaccaagccaccctcctatgtgcaattttcagaccccttggggtcccagccctgagtccagaaacctcaggctgagagttggactagaacccacagcaagggtcccctccagacctccaaaatgggccagtgtagtactcattcccattttatacccaagacaaccagggctcttggaggccacaggagggccaccgaggtctcaggtagcttagaaggaggacagagcatgggtcctggattccctgggaacagtgcctgcccagagacccagctgcccttaggaacgaatgagtatcaaccagctgaggctgcattttcttaaaatgcattggtttgtctagtgttgtttatgttctttctcaaacagcaggaagaggttgtgggaagagccctggctgtcaacaggcttctcccatgcagtaggggtggacagagggactgcagccagggtcaagggcaggccatggggcggtgggacagagagcaggccgcagcctcatctggcctcagtagccttgtacagaggcaaaggggcttccgtgtggggtgtcagctccttccacacctgcctggacccggaaacaggcatgccttgagtcaccagcagtgggcagccgtagagtcactgtttcaacaccgccaatttgttggtcccacgcctggggcccctgtggtcattgcagtatgttttatggaacattctgtgaggattcctcttggggttttttagcagccacccgttaggatgttcctaaagtagaaggcaaacagcccacagggcctcagaattctagaaaaaatgtctgtgcacagcatgggagcctgagccaggagggcattctcagccatcttctaaggagccaggtagaaaaatggggtcgattctattgtagttacttccttattttagctattcattcagaaatgttagctgttcaaagggtatgtcatttatcaatcaggaggcgggagccccaggtctgcaggagtgcaggggaggatgtgagcaggtcagtcacaagctaacttagaacaagcattcaatcccccagaaaatgcaccggggaaagccacaggcattcccttttggtagaaaaggtccctggtctatcttcatcgatgggactctcatccggggtttgtaccaggggaacctggccaggggatggccgttcagcctctgggcatgttgggagaaggggtagttcatggtgtgccctgggcaccccatttctgatttctacccctgagccaggaaggcctctcccatcaaccaccgtgggactgtgaagcaggtaacaggcagaggtggtgggggtgtccaggggcctgaggtggcggtgaggatgggcatggagtactacacttcattgaaatgccagcagccaggaggtgagcacctggggttgggagtgctccctgaaccccagaactggaggcgttctgggggcattctcactagcaccgcatcgggacacatcagtccagcaggtcgcgctggtccctggggagcccagaatgacagtttgtttctttttgttctggctgacaatgatgccacaaagctgtttcagccctgactgagagtacaggatctggacagccccgatttgaatcctaagtttaatacttcgtagctgtgtggcctgggcaagtggttttccctctcggggccccagttttccatttataaactggggtaatagataatacctgcctcctttgggtggatgaggcttgaatggtggggacgatggtgttagtataaacacaacattgactggtgtcgctcatgtctgggggttcctgtcaggggtccaacaggaacaccagttactcctcctttgccattgggccagctctctgcagtcactggctggataccagctgtatgcatacactgtgggccataagtatcccttagacctttgtgggtgggggttaacagccccattttatacatggggaaagaaagttccagagagcttaggaggtatacgtcaagtcacgcagctggtcagtgacagacagaactggagccaagtccctggtaccccacactctgtctcctcagaacacactgccacctgcatgccctgattggtcaggagtgcatctggagggggtcagttataaggctgaggagaggtgacagggaaacgagataagaaacatgccatttaggtggccatgctttcagagcctcctccccacaggccaggccttgggctctccccactgccatcttatgaccaaaagaattgagagacagcttcccggccagcgcttagcagcgggcttgggtctgctgcctcctttcctgtcttgccgggggtgggggagagtctccaccaagctgcagacagacagaagaatggttccttgtcctcccaagggggacaagacttctccatgtccttccttcccactgggctggtttccaacccaccaccttcatgattcgtgaatgcaaagagaagaccacttagatcggtatgttttgcttccacttggcagccctaggtgctggaggctgcagctctgggtgaaggtgggccctggtctgtggggtatgggcatctgtgagcaccatctgcatgcagccccggaggtcaggtggcagagtctcccatgacaggttccagcagcagaagtcctaaggaagcagcttgtgtctcagatgaggctgtgtacctccgttgcctgtctaggctggaggaagggtgatggcacctttaactggtcccttccttacagatcactaagtgtaagaggccaagcctgcaaagaaaaaaagggagagggagagaggaaaaaaaactagagcctgtgcgctatgtcatttctaacactaaatgattaagaagtgaggaccctggggtgtgagccaaggcagcctgggttgctcagtcctctagaaacccttctaagctttcctcagcacacagcccagagtgctacccggagaaagagccaccttgtaaatcgctttcttcactgtgctgctatgcctttcaaaacaaaagctaaaaactcctcccacccccatacaacttgatttatcatgaccccgtcatctcggtgtcccggtgttagttcaaaatcaggctcaaaactgcaaaggctggagggagactgtgggagggtgagggacactttatccagcacgtggcacacgcacctctgccgcgtcggttcatgcgtgtccctccctgcgagcttggcggggcactgtggacactgggttctctgcctgataaagggggatcctttcatgtagcatgcatcaagatgcatgcatggtgtgctgggctgtctcagccactctcccaggcttccctcctgccggtccgcacacaagaggcagcgtgctggggagccagtggaataagggccccacaggggcaagatggccagaggccatttcagcatgaccagcatttatggatctccttctgtgtacctagcagggcagagtgcaggggtagggcttaaggaggggggcgtgctgatagcctcaggaggcccatctgtccctccctctctccctggactcctctgtcatcccatcccctcctagctggcatgatttttcctgtactcagatcgcaaaagactagcaagccaatatgtttgctgggggagtcacagaaggcgaagacccccccatccctgccttcacggagcttctggctttgtgagcccccctcttcttgttgtcaggctcccaaatgaccccaaagggtttgcttgcaaaagtttgtcctctggactttgtgtttttccccatctgctctaccctcctagtgcctcctggctccggccccagcgccagcccctgtctgtccctgcaaacacaagtcagctgtgtgtgcagacaaagccgtgcgccgcagcgggggccgggcctgcagaagggacatttccagggaactctgggggcggcggctgggagggcagaggcgactgtctgattagcagagactcggcgtcacagtctagggcaaagagggtgcgggggatttggccgggccccaggggccagtggctgtgggtggtgaccaggggaggcagccaggctggaagaaatctgctgtttgagaagtggaggaaacgggctggagaggagagataacagcccgttctctgtgtatctgcatgcgtctgccggcgagggtggctggagccgggcggtctgaggccatatctagcgagatttttgttctgggttgtgaaagtgacctatggagccagcagcagggttcagggcctgggagagaagacacgtggccctcccctctcctccccttgtcttgtgttagtctcccctcctctcccccttgtcaaacagtagaaaagggagggggcatgggggcaggagaggaagcattcttagtgcggtaaaaggcctgggtttcggtctggattgtaccactaatttgacatatgaacttggatacttcccctaatatttctggctgtctctgtctcattggctgtaaaatggggattatttataactgctctgcatagcacgcatgaaataaggacgtgaaaatagtttgtaaactgtaaagtgccacgtaaatgttaaagagttgtactgattcaaactgctttgaagcaggggctggggctgctgattaaagacctgccttagatgaactaggtgctgagtggtgggcaggagggtggggtgggtaggatccaagacttagggacccagaagtttccatggaggcaggggtgggtcacgggcccagccaagtgagccctgccagaaccaggacccagggcaggcgtggagggtgaagtccaagagctctctgggtgggggtgtttggtcatgggcttgcagattcaagtagaaggtggcctgggttgggcatggacttctccagggagacaggggaagccatatgaagccccttgcccatcaagctccagggcccctgcctggcctggagcataaagtcccactgattgcagagggatgggggcagcactctgttttcctctcctgagcctctgccacccaaggaagccaggtccccctgtccccccacccgctccccatcctgacctggaaatcagccctctctgatgtggaaactcaggcaggagctggcaggggtgacaagactgtgagcgggagagaagctgagctatttaaagcgtgcagcgcccaggggacatgaatgccacccacccacaaggccttctcagcattcgctttcccctccttggcccagatcccaggccctcagtgcacccacagggccacaggtcaggtgcccgaggctctgggaagctgcaggcggacaggtcctggggctggcatgagatgtggttcagtccaacctcggcttgggttccctcctctgggcctccgggctgagttggcggggccacacagactccttggctcctgtgccttataaacagggctgagtgtgagtgtggagcttagaagaggaatgcccacgcctgtggcccggggcagctgccaccacccacccccactccactggctaccaagccaccagactcagagagcccatggggcaggagtgggaagtggggagcttcgcctgtagacccttctcccctgcccaggcctggcttcccagaacaccccagattacagatgtttttctccttcatctccaattaacatttacctgtcctgggtcctaacctttagtgaatgacagggtgtactgtccctcccttcctatctgggaaaggctgatgtcttagctgggaagagcaactgggatccaggcctgttagacacagggtcccatgtaggccaccacaggtctggaccacctgggaggcctagctggggggctcccaggggccagtccaccaaccacagctggtctacattgcaccagcacggcttatgtatggaatgacttgaaaagtcgtcgactgccctttctgggaaggactggctactactctgagattgcatccttcctaccatattggcattaagttgtcctttcttttatgatatgacggatgaagctttaaaaaaaaaaatgcttagcaaaataaaatgtgggcaaccctcaaattttaccagtccaataaatcttggagctcaggactctggttccagaacagcacggttcacctggatacccagctctcctggcactgaggagcccggggataagaggaactgttgagtgtgtggggtacagcctggggaggcctccgaccctggggctgcatgcctcaccctgacagtaacttgcagcttgaactgccagttcatctttacacctgggatttccaccccaccccacctcctctatcctctcggctggagacacttcctcccacgtggctgggaattcagtgttttgctgtctgccgcaggctgccaccatcccgtaggccgggggaaacctgcggaggctgcctccaggcaagcgctgcctgccgaccaccgccctctgaccccagtccaccgagccccagaggcacccagtcagcactcactccctccagccttacgtagcgtccacacgtatgctgttacccacacgggccaccaaacctccagtcccctgccctatctcacacacatctttacattgctccatgtgcactctagtggggatggccttttccacaccaagattcattcatttatcagctgagcatgtgctgtgttccaggcagcgagatggtggaaaaatggaaaaggaggtcccctctcctgccattgggcatctcctaatctggtggggaatgcagacagtacccagtaactccagaccagcatgctaggtgctgtcatcgcggcacacccagacggccccgagcatcgagaggagagagaactcacatgagggtgtctcacagagagaggaacacaggcctgagtcccagcacctgggctgggggtgccaaacaaagaaacgtgcagaagggcattgtctaggcgaatacaggagcatgagcagaggcaagaagcagacaagaatcatgtacagcaaaagaaggggttgttcccgagtatagtgtgcactgggggctgaggtgggaggagagagtgtgggccagaaccagcttgggaggggcactgtttgccctacctggtcggagggaccataccctttggtctctggggcaccaccaaaggtttgtaaggatggaggtgatgtctcctggttggcatctttggctctctctctgcagcaggatggaggagggcaggataaggaccctgggaggagcaaagcaccccactgggggtgtcctattggagcctcctgggagagccaggagaggtgtgggcagcctcaactctgtggcagtggggcctaagggtcaggggatgatccatgagtggtcagcaaaaagagagagacagagagagaggtggggggactacctgtagagcagttaacatgcatcagcaccacaagcaggaggaccgctgggcagagaaacatgtatgcacattcatgcacgtgtacatgtgaataactcctctcacacatgctggaggaaaccctcgctgtcatccacactcccaggaatggccacattagacatcttccccctagttcctgagaagcaaacccgggagagcccagccctcagccttgctgcatgcgtgagcatggagttttgcactctggccagttttgcctctagttctttgtttctggaaaaaacaggcactagggtgaatttcttttctcttttcctaccatcccatcttccttcttccttctcttttgtccttccttccttctttctttccttccttccttcctctctcttttccctccttccttccctctctttctttcatgaagaaaagctcacagaaaggcagaaggaaccacagtctattgacgtttctgactcttagaggctccaaaccgaaactcagctgtggttgctctaagtggctacaaaattagaaaaataatttgcagaaatgaaacctgacttgggatgccgtttcacaaaataggctagatggccttgatgtgtcatgaggctcccaccactgcggcctgcactgctggaggaactcctcacatctcaggctggggagcatttccacccctgcagtcaggcatcctacagaaacctgccccctgcctacctgaagacagttcacagtttcctctgaaatgggcggaagagctggacccagccacaagaccatcaaggaaagcaaaaggctttcaaaagtgagactccccagagaccaaacccaggggaagggatctggggattcttaacagactccctgggagtccaaaccaggctgtgagcttggctttgccatgaactagctctgacctccgtgcctttggtaaacagtatcaacagctgccatttaccaaatttctatggggtaccttgcttggctgcacctggggagatttggaaaatgccaatgcccaggctatgccccaagcaaattgtgtcaccatcttatgggtaggacccccgcatcaacattgtttaaagcttcccgagtgagcccaacatgcagccacagctgagaaccactgcccccacccatttggctggagacttacgtaggttcatcctcacagcaaccccgccagggtttatgaataaggaagctgaggctaggagagtttgaatcactcatccgagatccttgaggttctccctcatcccaaagcccatcattcttcctcctttgcagggctggatatacctgtacagaccccgcacagcatcagtgagtgatccaaccagccagctgaaggagctcagagagcactgcagggagacaggggaggtgccggcggagcagtctgcctgttcctggcgtttgggagggggtgcaagcctcaggcctgtttttcagcctccctcccaagtcacgattggtccctagtcctggggatccaggctgtctgggtcagtttgaacctgagcctcactcagcagatgctcttagtgtctaagcccagcggtgggcactgtcaagagcctggactcaggagccgcattcctgcctaggttcaaatcccagctccactacttataagctgtgtgcctttgcaaagtgagtgatctttctgtatgtcagtttcttcatctgcatgatggggtgatgttagagttgttaggagtactaaatgagacagtgcatatcaggattgaaagcagttcctggaacatagaaaacaagaaaatcccaggcactgtaaggattacgactgtgaacgtgcagttcattgctgagcagaaactcgatggaacatgggcctgaatcagtcaaggtgataagtttaagtcaatgtttgccctttggccttgcctgttcttagctagatcagaacccctggggtatggagtccacacctggaacttcgaagggaaaggaggaacctgttttccctctttggcctcaccccagcccaggggtccttcctcctctcccaccatggtcattaccacccttccccccacccacccccagtcaaatactgactctggaagcaccttctgcatggggcagggggtggcctggatgacctctggagctcctcaccccaccatggcagtaaatctcccttcccctaccccaccactcagcctgtgccctgctggagcccacagcccatccatatggttcatcagcagcctgggaggggccctgtggctgggagtttgtttgaagcctccagaccattgaggcaggggcggagctgtggtcaggacaacagcagtgcctttcactggctctctgggagcagctgtgtggggggcaccggcccagaaggatgaccgacatccacccgcagtccttactatttgcgagggatagggcaaaggaggggcccagcccaggatggctgtgaccacattggttcacatgttaagtatgaaaggaaaagaaagaagggaaggggaggcggggaaagggaaggaagaaagaaagacagaaagagagggagggaaatagggagaaaggaaggaaggagggcaggaggaagggagagaaggaggaagggatggagagaggagactcacatctcagaagagaaaaagcaccaggagctttccttagtcaatcatctgcctgcaggttgctttacactcagggctgtgcagcccaactctaggcctcagccgcctccattctgagggccttggatacaattgcccccaaaccaggcattccaaccagggaccgtgacgggccccagctccaggcctcctgggtatcctctcatggttgagtctgccccctcctgagaaggaagaagaggcagggtgtgtgtcagcctcatcacgcattccatctcccagacggctgcctctgtctgcctgtgcagtctgcttctcttccaaagggtggtttgcagtgcagattcatggctcccagctagaaacagtattccctctgcccctgcgccaactcctgcccaattcttctgctcctcacccagttccccagcaccctgaggggactggccacacagaaaggcatgagaaagtctgctggctgtgtccacagtgccaagggttggaggtctggcagtcctctgcgtttggtgtctgtcctgattgtctctcctgggggtgacatgggcaggatctcagcgggaggtgaggctggggccaggcacttcttctccctgtaaaacactgctcagggagagcagctttgctgaccttgagctgggaccccccctttcagagtctcccagtgataatccccatggggacaattggatggccgaccctctctagcctttaggctggggggagaagaaacctgaatttggggtttttgtctctttcccagaagaggggtaggaaagaatcagtaacagcaatagcctgagctggaaacatgctcaggggccagtgcgtcccagctttgagtatagagcttcattctgagcacttcccacataaaacacaattggggtgccccaaggaggggcagacaccaacatttcaggccagaattccagacacttgactcctaggagagctttgggtaagctgtctcttcctccctagccttggtttcctcacctgtaaataagtggcctgaagccactgagggccttttagtgccagcagtgaatcctgtgactgtgttcctcctatctccctgtatcccagggccacacctggagcatttttcccctgcctggccacatacctgcccccggaggccttgttactaagaagggctcatggagctggaggaggtcaggggagcagtgggaacagccagaggcacagtggcagcctttgaagataagattcctaagtctgggaaatacagaggtgtggctgtaataggaacaggacacagaccctctcaccatcacagggaaactcaagggtctcccttggggaggtcactacagaaaaaatgagaagaagcacttgtacttctgtacagggtgggtgtgaactcatcaccggcccagaggtgtaggtaggccaacagtggacacggatgctagaaaggtactatgacatcagagtgagcatgactgagtctggttaacgatggccaaaactgtcccattcccaccatccaatagcacacctcttaggcctgggagaccctgggcagactcaggaggacgtgtgctgtgctgagcctgaagaaggtggcaaagagcaggtgtgtgcacgtaggtccctcagcacccatgggacatgttcctggactgcaagcctcatcttcctttagtacagtcactctaggcctctgaaccattgcttccttggcaggaagtaccaaatcacagagaagcctcaaatcattttcttcgggtttagggaaagtcactgattttcattttcctataacatgatgacaataagggctgggttcacatcccagctttgtcacagactagttgtgtaaccttgaatgggtttcttactctctccaagcctcagtttcctcactggtaagatgaggatggtaataatgattgggttggattgctggggattaaatgagataatgtagtaaagggcataatacaaccctggccctcaataagtgctcataatgttggctatggttcaattggactttgcttgggataatagtgaaaggaattttaatttcagtttgattcatcaggtgtgcactaatattataggtctagccctgtctgaaactctagggagatacagtcaagtgtagatcagtgacataccatattcatggactagaatactcagtattggtatgatgtcacttcttcctaaattggtctctagagtcaacagtctcaaatcaagatgccattaagccttttgggcagaaattggcaagctgattctaaaatatatatggaaactcaaacctacaatatccaaaggaatcttgaaaaaagaacaaaattagaagtataaattaagggctttgtttttttgctctcaggaaccttaagactagtggggaagactaataagagaccccatgctgcttcctaggaatgtagggtactggtgaagagtatagatgctagagcctggcccctggctttgaatgctggctttgccacctgctacctcatgaccttgggcagggtacttttcccctctctatgtcctaggtgtctcatctataaaatgggatgatcacagcttcattgccatggggccattgtgaagatgaaaggagctaacccatgttagcctaaggctgcctactaggtgttggggaagggatggaagtagaatgaggacagaggttccgcccccagtaccgtatgtcctttggagaaggaaagcctagaagctgaaccacctttccaaaaagggaaattctggaataaggatctcaggctctgtgagtacagccacctccttttctaagacccagactggggaaatagctcatccagggtcacttggctgaaggttaaatacagaggaagtgtccaacaggcagggagtgtgagcaaaggtccatggcaaggagttacagcggtgcttcttgggccatgggagaaggctgtttctggagtgccgagttcgagggggcatggggctaagggacagccagcaggcatgagtcaccaaggggcaggctgccaaatccaacaggacgccccatggagccctttggcctgggcccagctcagcagccccctccccatcccccggacacacgtaccccaccaggcctggagacatttcctgaaagactaagaaagcactgggagctggacgggcggcctcaacggccagaggcttgaggccaggtctctcatggaggagcagacgaagggaggacgtgaccggcagccttcattctcacaggccagggatttcagaggaacgcggccaagtctagctctgaagttcccacttcagaccccgcccggctggagccacgggcgcctgcagtcgccaccctggaaatcagagaggcacgtcataggccacctcgtgctggggaacacgtcctcctggggcctctgtcagctggctcacctgctggggttcccggatagcccttctccttctgctgggccatggaccctcctctagccagcttcccccaatccctgctctccctcagcccccaaacctgtccaccttctcactccatcttctcaggagagtcctggcacccagaacagacctcctaggaatgtcatgtctctgtctttgaggtcatgagcagacctggggcaggaaggggaggccctgtacaagccctacactgtggctcaggcccagagaggggttgacaccaggccaaaggagggacacatgtccacagatagctcccaggcctcctgcatgctggctggtcagaccatgagagccacactggacaggtgaggaaactgaggcccaagaggaaatgtgatttgcccaaggccctatagcaagatagaggcagagcagaatggaagacctaaggctcccaagccctgagccccaagctcttttaagtcattttcatggtttcacttcattttcttttttcatttccttccttctttaagagaaaggcaggctctggatagacaggcagggacacaggcagggctaccagaaactcagaggaaagaagagagtggcccagggttgggcagcctctacccccagcccccaagctgagtggaagcccctccctcccacccagcctcagcctggccctgggggctccccttagtgggagctaccagtttgtggacacaggaatgtgcctgtggcttgcccagagaccctgagggccagcacctcaatcacagcatctccttgccccaagcagcctgccccgtctcaaccgtagcttttatcaccttcctccatgcctctctagtgagtgtcttccctgagtcagcagaacctgttcatagtcatcccttctcccagattaatctctctctctctgtagccttccctgatcacccaggctgctggagtctatctgtgccctcactgggcactcagcttttgccacctggtgttcttagtgtcatctcttgggtctgttcctgtctctctaaccaaactttaggcaactttgttcattcaacactccatgaattcaaggcctaccacgtgccaggccctgggctatggtgggattcagcagcaaacagacagactcagcaacctgccctcatggagcttacattctagcgaggaggggatgataagcatcaaagcaacagatctgcaaataagtaaatttccaaaaggctgtggagaaggaagcagggcatgttgggggacaattttaaatagggtgattggaaaagagctcacccaggtgacccttggataggcttgaaggagtgagccgtgcagacctggggagcatcctggtcaaagagaaagagcagtgaaaggcccagaggcaggagtgtgcctgccccatgggagaactgcaagaagtccaggtcaggggggtgggtgggagccatgggaaggcatcaggtcagcgggatgctgggatctataggctcacaaggacgagattagctctgagaggggtgggatgcatcagagggtttccagcagggaaggcaaggtctgacctgagttttaatagcgtcactcaggctgctgggttgagaggagtctgaaagggtggagtagatgcagggataccagcctggagcctttagggggacaatgagcataaaagcaatggatccacaaatctgttgagtaaatgtgggagagtaaataagggagagtctaagtaaggggtggtggtgaagtgattagggtgaagggacaggtcagagtctgggtctactttcaaggaagagctgagaggatcctctgaaggactggacgtaggtgcaaaagaatgttggggtcaaggataacctaagatctggggcctggacaactggaagaggggcttaccactaactgaggtggggaagatgcttcaggagggtggaccaggagctcactattggacatgtcatgttggaattgtgcaataggaagtggccaggttgagtggacagttggagcccggcattcagaggggtgatctggatagaaataagcctcagggagctaatttctatccaggtggtatttaggtggtgctattaggtggtatttaaaaccatgagacaggatgccatctccagaggatgaggatctatggtacaaaggccacttggtgtagagcagaagctgtgtctccagttgtctagagttatgaatgggtggctgatgacggggctctgactccaccgctgtcacaacaggccaactgcaggagagaggcttcagcctctgccccctccctgggatccccttgcaggctagcacaagggagggctcaggagagacaagtaattatccttataaatcaggaggctcctgccagggagaagcagggaggggcaggctgcaaccccaccccctctaagtctcttgacatttcctgggaaaatggtgtcattttatcattttattccttggtaaggcttaaatttcagctttgggaaactgacagagaggataggataggtgcctgggggccagctttgctccctgtggctttatataactcaggcctttccccacagccatttacaactctggcttctgtaatgtggtgccagcaggattaagtttttagcgcccactatattttgtgctctgtatttctgacaaaatgtttcctccctcatgatgatagctcagtaaacagaatcccttggcgcaagtgacatgctgggtggccacaggctccggggggcttcttgtgtgcccccttctcctcctctcttttcttaacaattagcccagctcaagtttatcttcatttattgacttttccctaaaattgctcccaaatacttctttgaggctgccataccaatgcccaagcaggaaaatagatgagttcaaaatggcagcccaccccagttttatccgacttgagtgccatttccccaggaaagtgggaaggttttgggggaaaagcctgatttccaggcagccaatacacagaccacaggactgtatcacatagcccagccttgcagatgagatcctgagtctcccagccacccatgcccgcacagtgctggcagtgggatactaaaaattaagcacctgttaccttcgcttctgctctacagatttcatccccatccccatctccccaggggaggcgaggtaatctgtaccaccttgggatcctttgggttttctgactagtagcccaaagggtggctctcagccccccaaagcaatgccccagggccattctacctcactttccccattctagcccccagcttggttcctgctctctgcccattcctcctagagatatgcagtcaataccactcacatcttttgctgctcctttgacagatgtattcctcccagctcagttccaagctgaaggcatgggtgagcctttgaacagtgttaagtcacattaggcacagaatcagtgagggttcggcacagcagtgctggaaagacagggtcggggaaagccagatctaagggccatctgcaactcgagagctaagggcctcagctaaactcccaaacagcaaacctggcctccccagggtgggcgaagggtcttggggccgggggaggggttgctgggctacggctggttctcccacagatggggtggctctggctgagtagtggggattgacatttcagtagccaactgcctgaggtggggggttgaagggaaacttggaatcagagggaagtttgggaacattcttcccagaatagctttaaaaataggacagctttacaaaccacccaggatgattgaaggcaggtgggatcgaagcagatgccctctggagatgccctctggagatgcttgtcagactggaacatgtgggaactctggaggttttcctgattgttcagcagatttcagaaggcagcctcggatcttccttcccccaggccctttgtgtgtattgcattcgagtcagcacctggcagagaggaggcccacaagcatctgtggagggagggatgtgtgtgtggatgcatgggtgatcggtagggggttgcatggatagatgggtcagggtgggtgagtagatggatagatggatgactatagactccacattagctggcgagagtcctgtgtgaggattcatgcagaacatggcaatcctaagtggttagttttgccgtagcttcctgttaaatagatgtcaccttcaccttaggaagaagctatattttggaagcaggtggcattactcctggctttttttgatccttggctggcaagcttaccttttacttgaaggatactgtgtcaaaccatggacttagttgccagagagaggctcatcagagcatggaggctgtcatttcaagagcccccataactgccattctcctctcgctccctagaccccttcagagtgccctacaccctgcaggtgggccttagcctctcccccaacctgatttctccaaggtcacaatttcttgggattctgataatgcagtttttgaaaaatgggccatctcatgggctaccacagatgcaagcctgtacttcaccttctcatctaaccaggagtattttaagggagtcccagataaaaggaagcctgcagtgagctcttccatttaatgaagatgcccattggggaaaaaagtcacttcttagttttatcttattcgggtttcttcaaatggcttgcaaagaggcacctgcatccccaggctctttcagatgggtagtcctattttcccaggagctctttaacctggaaaatagaactagtcctccttcctctggttccccagaatcaagttcaacacttgggtatactttctctgttgtcatcagcctgattactaagaattctgtgttgggaagaatttcagactattaggggaggccatctctcttgagggagggtttagtgtaagaatttaatgtttatagaaaacggctttttttcccccaacacaagtctttgccatccacaccctgggaaagccgagccacctggcacccacagctctcagccaggtaccatctttcctgtgctggaagtcactggaactataggtcaggacagggaagagaagcaatccccaaatgcccaggtgttggttggttggtttgttttttgagatggagtcttgtctgccacccagactggagtgcaatggcatgatctcggctcactgcaacctccacttcccgggttaaagtgattctcctgcctcagcctcccaagtagctgggactacaggcatgtgccaccatgcccggctaattttttaattattttattttattttatttgagatggagtctcactctgtcgcccaggctggagtgcagtggtgtgatctcggctcaccgcaagctccacctcccgggttcatgccattctcctgcctcagcctcccgagtagctgggactacaggcgaccgtcaccatgtccagctaatttttttttgtatttttagtagaaacggggtttcaccatgttagccaggatggtctccatatcctgacctcgcaatctgcccgccttggcctcccaaagtgctgggattacaggtgtgagccaccacacctggcctgaatgcccagttttgaagttggctaacatgtccatcattctgcatgtttatggatcagtgagggcctgtgtgccgacaaagggagcaagctggagatggtgagaacagaaagtagcttatcaacatggacatgatgacaaggaagtggccatccgaacctctgccatcccatcacacctgcccccacactcaaccccacagccacccaagggcagaaggacttagaacaggcaaagccagcccacagctgcccaggggagaaggacttagaatgctcttgcctcttttacatgctcacagcttctggaatatttgtaagtgcactcctactgaaatcgcgtgggtagctgatctgagggacttgtgtgacgagaattgtttcccctatccacactgcttagtgagtctgggctggagatctacagtttccttaagaccatcctttatagagctcaggtcttttttctgacagctggaatcacaggtgcccaccccagagcaaaaaggccatgtcagccatctgcagcactggcctccctctgcccaggtctccaatgtacttgtcagagtcccctgtggactccaaggcctcctgtgatcagccacccggtagatgatttcccagagcactaccctatagggaatatctaaactatccctaatttttctcccttcaaatccaacttgtctcagtcctgtttttctcataaaagggcaactttctggctgggcacgatggctcacacctgtgatcctaacactttgggaggccgaggtgggcagatcacttgaggccaggagttcaagaccagcctggccaacatggtgaaaccctgtctctactaaaaatacaaaaattagctgggggtggtggtgcgtgcctgtaatgccagctccttgggaggctgaggcacgagaatcacttgaacccagtgggcggaggttgcagtgagccaagatcgcaccactgcattccagcctgggtgatagagcaagactccatccaaaaaagaaaaggggtgggggggcaagtttctgagttctgatcccttgaactgtgctggcatgaattgtagctgatattttaccttgtgagttgactggggatttgctggggagacagagccttatcctgatggtgcggtgttaatgggctgacctcaggcactgtggtattctggggtggggggatgctctgaggcagaaagtgcccttccacgtgttcctcagattcatccaatgaggcctgcacttttagtcctccctgggtttctctcctgtaaaacaggaatcaggcagttagatctcatagtacctgtgtgaggtaacagggagcatcttactaacctattctccagatgcagctcagcaaggccgagtgacttgcccaagctctgctggtactctgcactctccttggatgtttgcccaggaagcagagccctcggtggtgggcaaagccagtagcaggtggagagagaccctgccaggcctctctgctcctctgaccacagtcagagtgtctcttatcacctgggtagcacttcctctgcccgcggcagagccagcgccaccaggggcaagcagacgggtgaggaggtgccagacaggattgatagttccagcctcctgtcctttccttctgcagacctgtgagggagctggtgttatttttatctggggacactggcgtgggaggtatttgttaacgtcatctggtaaacgcagttgaattatctgttgtccaaggaaccctcaaataagtagtgttaagcatgctaagccgctcacatttaaagatacagttagactcctgggagagaatttgcttatgctgctgccatcacaactgaagcccagagctgtcagttccagagcccgggctttatttaaccctcttcggtttggggttcatcacacataagggctcgtgcttttttgaaaaccatgcttccctatctgttctctacaagtgggaaagtgcttgcagtctgtgggttcagtgcagggacaggttgtctgcacttgctactgagtgtgtgttaagttagcacagtactgagttccgagtcccatgaagtaactgtgtggcataccggtgtgtgtcctgtgcagcctgcagctttctaaaggcagtttcggggtgcacccccacctgcaggccttacattatagccccctctcttaatgcgctccccagtatttctcaagtgcctctggatcttgctgtgtcctgagaagttgtcccatgggtgggagcagtgggcaccattgtcactctcagcagtggttctcaaccaggagtgattttgcctccagcagacacttggcaacgtctggagatattttatctggagctttcacaactgggggtgaggataggggcttctagtggcattgagtgggcagatgcctacggtgcacaggacagcaccccccaagaaccaatgagccgaccgaaaatgtcagtagtgccaagaatgaggcaaggctgctctaatcttgaggcagatggagcctcctctcgctgccaccagcgcgtgacttgacaggaggtggctgggtcagcagggctatgagtggagaaggtgaatggtgccagccagcagcctcgggtcacgcggagcagttcagaaagtcttactgagctctgcaaggccaggatcaagccagattttaaggggatgataagcaaggtgtggtctctggccataaagacaaaccatgcagttttgtagaatactctcagttcacaaggaggttgtatatctcttgcctcattcaatcttcacaacaacttatgggcttgatgggacaagtagaatcagccctattttgtggatgaccaaactgaggcccagtggggtaaataacttgcccaaggtcaaaaagcagccccagatgatggatttctggtctttcactagagcatttggatctctgtgctcctcttccctcttgggtcctactggatcccatgttggtgaggaatcagtcctttcttgtatttttatctggggacactggcatgggacgtatttgttaacatcgtgagtggacacctgaataaggacagaatgaacttcccatcctagatgccaccctttctcctggggaacttctataatagcccaaagccagagtaatttcattttcatgccttctctggccaagctcagatctagccagggacttccccattaatataggggccagaagcccacctctctctgtgcacccagattatttcctccctggggttgccactgccttggagccccccatccatttattcagttaacagatacacactgagggcctccagtggcctagacgcagcaggtacattgccgaataaagcagacagagtttctctgcccttgcagaacttgcaatccgagtgggagaggcaatcactgaacgcataagcttacaggtgtgtcatttccagttatgatggggccacacagaagagccaacacaacacagtgagggatgtcacaagagtggagggcctacttagagaaggcagagggcctctgggaggagaaaacaagtagaccgagacttgaaggaggtgcatgtgcaccagcttttcagcagccggaggaagagggtccccagctctggttagagaagcaccgtggggtgaaggtggggcaccttggtatgcatggtgacaggatggatttttcttccccactctaccagtatttcacagtcagcatccccatcatcagaaatatcttgatggcctccattcacacatcaagtcaacgtgagtccccacactgctgttttatacctggcagttttgtactgttttgtactctctgccagatactcaagagaggaaaagaggaataagatacccaagaggcttacagtctagccaaggaaataaaacatgcaggcaaaactagggccagccggaacatctgcccccatctccagccagcccatcacattccccaccctcagtcccctgatgtcagtagccacctactgttctccctcctgtctgcagagataccttccctcttgctgactccaacacccaccatacactggccaaggtgtgggaggtcagccaggctaccccataacacctggcatggataaccccccacacacccatgtccttggtaagaccaaagaagcaggaggagcaggcatctgcggaggtgctcccctggccaggcattttcatcatcacggtgtttagccgtgtttcccttttctgggtggggaacgtgagacggtagaagacctggggcttgcccaggtccaagggctgagtgggagtcggaccagagtgcctcacccaggcctgtctggcattcaaacccattgtgcatatcttgacacactagtgattttcatgtatttttagcagaagagttgtttttccaaactcaatctcaggcgtgtcctcaaccacatgaaacagacctggcaaagggcctctgcctgggatccaggagctttgagtctgcccactcaactgcccttcacccatccccacaggtggcccaagcctccttgggaacaacacaaggggcccatctagtcttcagaccggatctcagaacgaatggagaaggtctgagcacttccttcagggccacccccacccccggcactgctcagaacagacctcactgagtccagtggggcagaaccacacagaatggcacactgtgagagaggggcccattcagacagagcccggtgcaaacagctgccatccacgtctgcagaaatggcaggcacaacagtcacttcctggtctataaccccatatggtctccagaggcaggcacaggccaggatcaccatttcacagacgcaaacgttggtctcccccaagctccctagactttgtgtccttctctatcctggctccctccgcctccggctgttcctcaactgttgtccagtagacattttgggatacggcttagataaaggatgtgtgcactcccattgcagcttccttgagggataatgccacataaatgttaacatgacttttaaagaccatctgtggcaaagttcaaagttgtgggtggatgtgagcttcaggccgagtcattctggaatccccattataggtcaaatctttttgtgagcatttcaaggggttttctcaaattctataaatagcttagtaacgcctgtgtattcatctatttttaaagccagtcttccggacaatttcagaagtaattgggccactcattgaaagtagggtttcaaaagtcatttcttcagcttccaactgcttccagagcagagggatcccagatgccatttctgcctagggttggggacccaaccttcttagtagaacctggtccaggcagaaaccgtggagaagactctaggaatctccaaaaagctggataagctgaattctggccccagctcccagttcctcccacaggaaaccttggatacaacattcatccaacttatgcttcagtttctcacatagcagaatatgggcacagtcaccctttgctgattaggaagggttattacacctgtttgcgtcactctgtcacctgggtgcaggtcaaaggtctctttcattttatagataaggatgcagaggcacggtgactggcctgacagtcacatggtgactttccattttatagatggggacacagagtcacagcagttggccagtcttgctgtccttttattttgcggttggcctgctcctcaggctgaggcctcagtgagcacagccccactctgtttccacagagagcttcatgtcatggataagacctaccacctgtgcccgggcctaggcctggcaaacacctgtctccaagccctcggcctctctcctgggcaggatggcagccaggcagggaatatccgaattctgcagagacaacaactcagccctctcctctgaggacctggagggaagtgtaaggcaggggtgggtggctgtcatgtctgcatgatgaccttttcaaacttgatgccttggggggtccaaagagcaccaggcccaggatcagagacctgggttccagctctgtcaacctcagaaggtaggcagatcaaggagcctcatcctccagtgagctgctgtgtggggcagagccaggaaagctgcaggaagtgcctagaaaggcagagtgctgtgtagaggtatggcgagacagtgacatgaacatcaggcaggcggcagagaagatcagggcgccagcacgggcaccagctactaagtgtgtaatcactgagggctgcccttgagcctgggaacttcagccccctcacgccccttgacctgacaagtggtactaacgtcctccctgaggctgagtccagtgacaccttgctttgaggaattcctgcttgtcccactggtattcttcatctgtcagacaatccagccttctctctctgctcaggctgaaaggaaaacttccagcctcttctgagggcttttcaaggccacagccacagcaggtgctggctcccttgcctgagaataaggcttcgcgcctgcctaagtgtgagacagaattcctgctggatcagcctgacttctcagcttctctctgctgcaacccagcgccatccccccgcctccctgtcccctcctacggatcagcagagctgagcctacctgacctgattttgccaatagaaatatgctgggtgctcacagcctgggaaacttggaaatgtctccagagtgatccagatttagctggaagtggctgatggctgttcccagccacagtgtgtgccctttgtctagagccaactgctggggagaaagcatttccagccacagtgtcatgaaccatcagtcacagagaatgtgtctggtaattttttattaataatagttaaaggatcggcatttggggcttgattttcatgtccattgattagagcagattcaagataatcctcatcatatcactctctcttcattcttttggatgggacagaaagggcagcaatcacccagtacatcgggaatttgacatgatgctcaggagagtgtcaggcacctgtgacagccacccgatggtcctaggtaaggcctgtgattgcagggggcagctgttatttctgcgtgtggtccagggatctgtcactgagcccacctgccccagctgcagaatgaccacatgacctggttctgtccaatcagggaaccccatcaccacagccacagtgattgggctgagagatagtcatgtgatgagcagggccagtcagaatccttccctgagatttgagggtttgacatttggggagggggggctctgtcttccttttggctcaagaaccattatgagagagaccaggtgctgctgaccgccatcttagccatggcaaagggagaacctgtctgtggcagcagaaaaagcagtcagcatgcaagtcaaagcccagacaagggagagaggggagagaagggaggaccagccctggggttgctgtttgagccctggggacaggctgtgtcctagggcccaccttccatgtaagacagcccaggcctgtgtgcctcttcagctagtctgagatggtttctgtcactggcatccaagaatcctcagtgtctaggggcagagcagagtgaagcagtggaatggtcaggggtcgttggccagggagatcagggatacttggggaaaggttcaagtccacctaaaaagggacacacccaaacccaaggagtagttcagggcccagctggcatcagaactcaagcaaacttgtcccagggcggaggctgcagcccagtgcccacatggtccccgtctccctccagacaagatgtgcagccaccacagactgttgccagagtgcagagtgacatgcaggtcagattctgactgctccagagtctaggtgtggctgagtcctcagggccaggcctcagggctcagcaggactgagccaagactggcagctgtggccaggacgtggcatgatggccagctgtgagtacagcccagcagacatgccccttggctgggctgcatgtgcagactgccaggggtcgggggcggccaggtccgaggcaggctttggtggatggagtaactcaggatacagctaccaggtctctctgccgcttattcagcacctactttgcaccagatacgttgcacatgttactcatttaagccaaggaggtttgcctgacccaatcagactgatgccaagaccttccacgatgctgccctaggtgggtgtgtgagaggcagggtccatgggctgccacccaggacccgggcaataaccagatcaccccttccctgcttctcctcctatcctgactccagctctgctagaagcactgcccacccagcctcagtgcccacttctctgactctgcccctcaccgtccagtccccagcatccaggccccagtctcatcctcatccccagggcctgggaatccattattttgtcacctaggagaagcctgttgtactgatgagttctttttgtcccaagtcacaggaaccaacttgaggtggcttaacattgctaaatccttttctgtaaggattctgaggtttcatggagcccagaagtcccagggaaggacagaagggaacattcagggtcgtctctcaggctgggggtaacctgatgtgtcacagtgtctgtgggttccatgctgcaggccagccctacgcttgggaattcccagccctctgcttcactgttgataggaacaggtgccaaggaaggactgcactgtctctctgagctggaggctcctgtcctgggctcctcccaaatgatgatgactggggtgagaaaagagccttccaggaactacccaaggccaggtctagccatgggggccaggccgcaggccctgggctgtgtgataggaacggaggagtgagggggcttcactggtgggggggaccaaggaggaaagcctgccggggggattgcaactagcctcagcaaagccctgaggggagagtctgacacaggggagactcggggttggggtggagctacattgacgtcaactgtgaccccaccacaccaccaaagggcggctctgcggaatgtcgtggccttacttgaagcaaccctgggaagggggaaaaaaaatccaataagccaagaaacatcactgtatggcaaaaatgttacccacaaaagtgaaacaaatgtcatgagacggtggccttggagcagggactgggactggcccagagaaggtgggaagaaaatatcaggagtgaactgtcagccacaaatgaaagaaaagatgagacaggcatacatgctgactctgtactcttatgtcttagattaacagccccctaccctttggacaggttgtcctcttagagaagagctgtctgaccacgtaccgtgggatatttatgcatccggtccacacacgttcattgaacacctacaacgagccaagtcccattccaggggacatgaagatggctcagaaaacaggattcctgccttcaggaagcccttctagcaaaaagtcaggtcatcaacagacatcagacctagtggaggtgatcagggctgggaaggaagcatagcagagtcggaatgaggagtcccgggggctgtggtggaggggacagccagggaagcctccctaaagagggaatgtgggagcaggaaggtgaaagaaggaaagttggggccaaataaaaaataaagcaccttttatttgaaaattagtttcctcttttcagtataaagaattctgtcaaatatgttttttaagccatgcaaccaattgcccgggagaagaatgcctgggattgactcctggctgctgggctcccacagctccccatggtctgtccctcccacatgtatccagcttctcaaggaaaagaaacttcctgctagcagtaaataaaagtgcactttctcctccccactggagagatggcaacagcagccacctctctggacagaaacaaaccagggtcactgggggcatagcgtttggatgggcaaatttccctaggccattcattttccaagagggagcccgaaatgagggtgagtttgcagcgattggtaggggctgcccatctccctcaggaagtgtaaaaaatatatgcatcatagtccttgtgcctcgactacccccaaccccaccctccagcagcatctccctgtggtggtttgcgctgctgggtggtgtgggggtgttttttcccctttgcctgtatacagctgtttttggcttggccactgcgctccaccatgccagagctcatgtggttatcccgagtgggaagaatttcccagaatgccttgagaaacctgagacactgaatggctttcagggcttattgatgtggccggtgcaggaaatagcagtacgtcaataaatagttttaggcaggaaacggggcttaaatggtagccttaaagtttggggaaaggcactaggggttgctgggaggtagcctgccaatcagatgagaacctagagccaaataccaggctttgaaatggctgccaccaatctgaggccccttgctgcttttggatacaagaggctgaggttaggggcagagctagaggaatggcttgtttcggttggcagaaaggactccttgttccagaggaaaagctggcaacctataacatgtgtcaagaggagacacacaggctgggttttggtggcctctgggcggggcatgttcacaccccagttccccacccttctcgtgagaatcactgctgactggcagattaccagaagaattccactgtcctaatgcaaaaaatcaaggaaaagggtcacaacctgccagtttcttttaaaatagctgtttttctgattataaagagaaacattcacagagaatcagaaattcagaaagtaatgtagagaataaaggtcatccataattccgctattgagagacaactcctgtgaaacactatttctcctctttctttttaaaaaaaactctattcatggatgagattatatggtaaatgcaatttcagttttgcttttttcatttaacattatataaacattttccccatgctattataaacgtttcataaactttttgttgttgtgttttttttttttttttttgagacagagtctcgctctgttgcccaggctggagtgcagtggcgcaatctcggctcactgcaacttccacctccaggtgcaagtgattctcctacctcagcctcctgagtagctgggattataggtatgtgctgctatgcccagctaatttttttgtatttttagtagagatggggtttcaccatgttggccaggttggtcatgagctcctggcctcagatgatctgcccatctcagcctcccaaagtgatgggattacagacgtgagctactgcacctggccacataaacataatttttaatggatgcatgaatcatcatttacttaattgttcccctgttgttgggtgcttaggtttttagatttttatgtgcattaagcttattttttctaatattttaaattgtttccttatgataattaccagaaatgcaactaccagagcaaacaataagaactcttaagacttattttaaggattttcagaaaagtcataccaatgcccatatataagtgcctgtctcactgcatccttaccagcattgacaattaccattttaagttgtccttatatatatagatgggaaaaagacgttttcattcattcaattactactgatattgaattaagttgttttcatatatgtattagtaatttacattttgacacaggatttacctcttaatgccctttccccatttgttcatgagggatttcatacttttattacaaatttgaacacactatttatatattaagaccattgccctttgtcacatttattgcgtgtattttcctgagcatatcaattgtcttttaatattttgatgcattcttccattgtcttagtgaagaaagcccccctccttccagaaatgtgagaaatactctttcattctcttcaaatttttggtcctttttttttttttttttaacatttgactctttattccatctggaatttattttagagcccagtgtgaagtaagattctaaattattttcctcctgatacttagacagctgtccctgcactgttgcttgagtgaataatgcttcctttgccactgatttgtggtcctcaagggatcatgtgataaacctttgtggatgccaaatttgtttctaggctatctgatctagctctccattcggatgtcagctctacagcctcttaatgaataaagctttattaaggataagttaagagtagtgtaactctttccaatgttgttttgtttttagttatttcccttgctattctttcaaattacttttaggattattttttcaagtcttcatttccttttctcccaaaaaagttcacattgggatatggagtacagattgatattaaacctgtgaattatttcaaagagaattaccatcttcacaatgctgtcttctcaataaggaattgtgtgtgtttcttcgctagttgaagacgttctcttaaatctttcagttttgttaggcaattttctttatagaattcttgcatatttcttaataatgtcacttaagtattttattgctttattaaatgagctttgtacattaaaatctcactagttaattctgtcataaaagaaagctgttgattttgtgtattaattttgtatctaaatattcttattaattagtcactgaactctcttgttaatgatactctttattaaaggcttctctcagattttccatatatttaatcaaatcattttatctcttccattctaagggtcataggtgttgctgccgttttttaatcaagcctattgaagtaatacattacatttatagatttcctgatactaagtcatccatgccttcctgataaaaatctacttggttataatggatctgtttgttagtatttcacttgggattttatatctattcacattagcaagattaacttgtagacttccttatttgtaacttactatcatgagattttgtttatagggaactggttggaaagcgtctctttttctatgttctgagtcagtttgcaaaggaaagcagttacctaattttttggaagtttgaatgaacttacctataaaaattgtaagtttagagatttccttataaaggtaattctttcataactttcattttagcttatgaatttttagtttattctggctcatttcttttttagcaaatgttgatttttttaatgaatcacctatttcatcattttttcaaaattatcaacatagagttataaataattttattatactttttttctatatcatatctgttttcatatctaattttatttctgtttcttctttcttgattttatatgtgatttcctttctctatttcctaagtaattaatttgggggttttatctgtattatgtccttatatttccttagctattgttggttttctaattgttttagttaaatgtttagatcaacattgtctggtagaagtataatgtgatctacatatgtaattttaaatttaataatatgtgttataaaatttcataggtaggtaatatttttaaaatatgagacattttacattctagtttttatactaagcctttgaaaagtaatatctgttttacgcttacagcccatatcagtcgggatagccacacttcaagggctcaatatattgtcacatgtggatagtggctaccatattggataacattggtttagatgatatattttcttccattatttagtggccaaaatagttaagtctataaattgacctttcattatagttttgaccacatcccacaagtttttatagttatttcctagataatctaatacaggtattgtatatttgagtatgtctttatttcatttttctttagaagaataccttttaagtattcaagcaattggctattttttaattgttgttaattcatagtcccagtatgtaacctgtacaatttctatgttttgaaatttatactgagatcacagcttactatgaagcttgtttcaatttaatcttattaactatattatttaaatcacctaagtcatttgttttttattcatttaatcggccatagaatgttagtggttttatttcctgatataattcttcctttctggtttttttcctatgtttcttttttttttcttatgtttcaatagcttcaggtatattcaaatctatactataaagtctataacattttgtgttatctctttattatggattgtatttttatatataaaaccttataattttatttaataattgttatcttaaaaatacttcccttttactactactttattttcatttgctcactcttgtttttacccatccatttatttttttatatcctgttttcagttctgctagtggttactagtgtttacttttagcattttaaaggcatactttcattttttttctctgattcccaagcttaagaaagatgcaataacctgtgaatccttatggcctaaattaggaaatgttgtgtgctttacagacttctatccccttcccaccagtatttactaatctctagtaatttaatcttggattattaagtcactactactataaaattcttatttaaattacattttaaaattaaatatcttctcttccaaggattatttctggcttttgattccattgtataaccaaaattataatgacttattttaacttaacttaataagtctacctggttgtagtttcagttttcccttctgtttcttctataccatggtttcctcagagttaaatcataaattttgttggccataacatgcattcggaaagttctttttattttttattatttttaattgtagttttaaaataacataaaatatactatttcaagcatttctaagtgtacagttcaatagtgtagagtcacattctcatgcaaccagtctctaaaacttcttcatcttgcaagactgaaactctctacctattaaccccccatgtcccctgctccccagctccttgtaaccaccattctactgtcgtttctgtttatgggtttggctactttagatacctgcataagtgaaatcatgcagtattgtctttttgtgactggcttatttcactttgcataatgtgctgagggttcattcacgttgcagcatgtgtcagaatttctttctgtttttaaggctgaatagtattccactgtatgtatatatcacgtattgttgatccattcatctgtgggtggatgcctgggttgctcccacctcttgtcagtaatgctacatactgacatctctttgaaatcctgatttcatttcctttggatatatacccagaagtggaattgctggatcatatagtaattctgtttttgatttttcgaagaatcaccatactattttgttttttgagatggagtctcactctgtcccccaggctggggtgcagtggcatgatctcagctcactgccacctccgcctcccgggatcaagcagttctcctgcctcagcctcccgagtagcttggattacaggcacccaccaccacacctggctaattttttatatttttagtagaggcggggtttcaccatgttgctcgggctggtctcgaactcctgacctcaagtgatcgacctgccttggcctcccaaagtgctgggattataggtgtgagccaccgcgcccagctggccatactatttttcatagcaactgcagcattgaattttttaagataaacatgtaggagtgatttgttttagaacttgcttatgtaagatctttctctcgctttcactcataggcaggtttgttcttttcccttcaaactcatgaagacgttgccttcatgtctctgaatttttaacctcaaataaagaagtataaggccaaccagatttttcttcctttgtaagaagactgtcttttgttccttcgtagctgtttttaaatttttctttttctgcgaaactaaaaaagaaaattcagcgggggcaacgtagaccttgtctctacaaaaaaatttaaaagttagccaggcatagtgttatatgcctgtagtcccagctactcaggaagctgaggtggaaggatcacttgagcctaagaggtcgaggctgcagtgagccttaatcgcaccactgcactgcagcctgggcaacaaagcgagaccctgtctcaaaaaaaaaaaaaaaaatgaaaaaagaaaagaaaattattccgctaagtaaaactggggcagggcaagggacttccggaacactgtgaacactttttacccaaagagtcaactcatttttattattatttattttcagtgagaaagtttatttctctgctctctttgttctgtgtattctggtatgctttttgaaaacttctctaattcacagactagatgtccactctctatcttctctatcgtttttctttttgtttctagtctatttatctttgtattcagctttctggtctatttatctattctgctctctaggtggtttccaagtttatcttctgcattactttttctgcattatccattctatcctttactgcctccaattcattttgattttgctgttggatttctagtttccattggctctctcctaatcccagttcctgtctcacacttcatttcagcctgagagttgcttagctaatcacaatcccttccttcgaatgcctattcacacatcatagaatctatattgtcattctccttacatacaagcccacatgttttgcacttgagtttttcattttatttatatctggttgattgtcattaatatgttcagagttacacatttccattaagttttcacgacactgctcctttattctgccaggcaggatttttgtgtagatgccatattgctctgcgcctccctcaatcctgaatgagatcacccctgtctggtcttttgtgtttgctgtgcgcatcagccttggactagcttggtgtctgcttaggcagagtctccctctcagacctaaagctggagggtggcttcatgagctcatctcaaatccaatttccaatatttagcaggcattcaatctcctagtaacctttgctagcccaaaacagaatgctctcttgatgccatggatgatcaggaagaaactgagtcaagagctagttctttgatcagatgcaatctattttttaaaacttcagttccttgtacacactgcctccaagttttttcctgccccagagggctttgcctgagagcaccatcccttaaaggacacagcatttcacccagtctcctcctgcccctgcactgccccgaatctccaaggcctggaataagggtggtgcagatgggagctgccttaatacacaggcacagggctttgctagtactgacagatactgtctaccagccagagacagatagaggaaggggctgaagcctcaagctaccccctgtctttggtcttctgggtcccctgggcaaccagaatttgttggtgacagcactttagttaatgatgtcacctcctgagtctgggaggagtctgctggggaactgttatcttccttctcagtgttgctgtgggactttgttctttgatgtgtgccttcatgggtatttttagggaatataaggaaatgacaagctgggggttgatagaggggcaccattttaacacccgagttagcacttgataaaggcctagagttgtggttcagagccatggttgcacgttagaatcagctggggagctgccaaaaattaccagtgtctgagccccaccctgaccagttacacaagactttccggggtggggtcccaacatcagcagcctcagagttcctccaggtgactccaatgtacaaccagggcaagagcgtttaacccagagcagagaaggggcttaatttttcattcaagttctagtactgtgtggccttagtcatgtcttttaatatctttgtgccttagttgtccccattttaaaatgagaatggtaatgcccactcttgctcagatcacataagaatattgtgggataaacaaaggttcatgagaatgaaaccaccaaaagatgtgtgacttcaagcccagtagtgcagggtccttggcaggccctggggtggcaggcaatgtaattcattcattcacaaagaccctgaacagctaggaccccctgtgaacactgcctgctccaggctctggactagggagaagagacaaagctgtcaaagatgctgggcacgcactacttgcggggtccctggagtctcttgtggtcccttttcaccctgggtgaaagataaacagcagaactctacaatcatacccaggtggacaattcagtgagaaaggagtggggaggcaggaggcctgaggggtcaatatgaggcccatgaggtctgcaggcatggctgcacttacaagggaccgtgtggacaaatggcttcgtggaaagtacagacttggagagtgactaagcgtgggctctgatgcactactttccaatttaaaaacaccataagagctgctcttgccacaaaaacaaacaaaacaaaaatgggtaactgtgagatgatggatatgttgtttgcttcactatagtaacctttttactgcctatatgtatcccattgcatcatgttgtataccttaaatatacacaaaaacattttttgaaaaataaaaaacaccataaggagaaaaaatgtttggtctccagagcaggctgacgtcagtttgaatcccagccctgccactggctcatagtcatgggcaagttacacaacttctctatcctcagattctccatctataaaatggggcagtaataggacctgccttataggaccattgtgataactatgtaaaataccacaattaatatccttggctcagtgtctggctcacaaatagcagctgctgctgttactgttttacatataaatatagatatcaaaatagttatagatacacacacaagtatatacttttttgtaactgatgaaactcaggtcattataagctgtggcctaggctcatccaaagctggcactgcagggcttctcagccagcccctgacctgccacctgaggagaccaaggcccaccctctagattgcaccttcatcactcacaagggacagatgttaaccaagtcatctctgagggccttccatctctggagatgctgagattctggtgccaaggatgcttggctgaagtcagcagtggtgtgggggactgggctgtgggaatgctctgagtcacattctacaacctgtcttcccatgttctattttggtggtgacacagtcacccagaccaagaatcttggcgtcatcttggagtctcccctttccatcaacccttacaacccaccacttagcaagtactattgaccttcacaatgtctcttgtgtcactcctgtattggtcagctattgaggctgaacaaacaaccataaaaatctcagtggcacgcagcagtaagcgtgcatgtagatgatgtgtgtgcaggttggttgggggtcacctgacctaggctagacttaggtgaggccctgtcgcatatgttgcccaccttctccctgggaccatcaggctagcccagagagagtcttcttaggatgacagaagaaacatgaaagtcaacataaatatttaacgcctcacatcagaattggcacaccatcactcctgcctcattctattggccaaagcaagacatatggccaaaaccaaagacaagaggtaggggaaatatctttctgaatattatttaagctaccccagattcttatctttcagctctcagagcgctgaggttttaatttcatcctgcctggatgcttgcagtggcctcctgtgtggtctccacaccttagctatattaacctttctgttgagcactggtatgactgtggtatttcatggccccatccccaaaaccttccctagcgaccatcccatggaacccagctccttggttttttatactttcttctcttgtatcacagtgatgaatgaatatgtcttatcttagctcctagtgcagagcctgtcacacaatggggcaataatatttttaaggaggatgaatgaatgaatgaacgaatgaatgcctaggcccctcgagggacgggctgtagctgtgtagcccagtgctggggcgctagcccacatggtcctctgttgccactgctgatgatgtgtgggtgggcagtgttctggttacccccagtccaccacgcagagggcatgacttgggggttagcaaagggagatggtttagccacagggagttaagtggaaaagtgctgagtctggggagggtgtcacctcccgttctacctcatcctcccacatcagcattgctgtcagtgaaggaggatgaccagcaggtctgggcaatgcctagaggcaaggaagctgtgtccccaacctggggacacctgaagaagaggtgttatggccccaggtcagggtggtcccagccacagagagtgcaatcacgcacccccatcctcatttaaaacatggggtttgcctgctgcccaggagcagccccaagacaacagatgctctgcacagcagggtggcacccaggcccctccccagccccgggaggctgacgcggtctctcatgcctccacagaaggacttcacggtgcgcgaggagctgcagcagcaggacgtggagcgctggctgggcttcatcaccttcctgtgcgaggtcttcggcaccatgcgcagcagcacaggcgagcccttccgtgtgctcgtgtgccccatctacacctgcctcagggaggtaagagacctgccgcctgtgccccctgcacagccagacagcaccaggtctggaatgcgtctcagataaccgggacaaagctgtgagggtaggctcacttagaaagggacccatccgggccaggcacggtggctcacacctgtaatcccagcactttgggaggccaaggcaggtggatcacctgaggtaaggagatcgagaccatcctggctaacacgatgaaaccccatctctactaaaaatgcaaaaattaaccaggcgtggtggtgggtgcctgtaatcccagctactcgggaggctgaggcaggagaattgcttgaacctgggaggtggagactgcagtgagccgagatcgcacactgcactccagcctgggcgacagagcgagactcggtctccaaaaaaaaaaaaagggggcccatccttcagcaaagagatgtgcaacagcagtcacttctgctccccaaagccaggtctttcttcgttgggtttatataaagggaaccagcacccccttcccccgtggggtgttgtgaactgaggctccagtcattcccaatcgggagcactggctgcagaggggaggcctatggtaagtgttgtctcaatgagcgatcttggaattggattggactggtttgccactggattatttattctatgaaaacatattttcttctaaatttcatctgaaaaagaaagaaacaagaatgaccaaggaacttttgagaagcaggaatttagcaggtggttgcactgccagatattataactcactttctacacccctctggctgctgtcaggggagagaattgaaagggggcaaagtggaagctggaagccgagtggggctgcttaggctgcgcagcaagaggttggtggcttggaagacagcctcggagtgagggcgaagagcacgtttaggctctagttgaatttctgagttagagccagcaggactcggtaatgtgagttggagggaagggaggaggggacatgggctccccgtttaccagcctggtggccccattttctgagatggaggatactggatgagaaatagaatggggatgaaaagcaagagtcagttatgtttgagtcgcctgttagctgtccctagggaactgcccggaggttggccgggtggaagggtctagagatcctgaagaggtcacgcatggaggtaggggatagagggttctgggaagtatcgatatgcacctggtgctcaaagctggggaccaaatggaaccacgcaggaagagagtatagatggagagggagaggaagggggcgtgtaagaaccctcacagcagcccttcactgggacctggacgcctcccccatgttgtaccctcccaccaccggcaggcctctgcaggggctaccaggacacaaggaggaacagcctcctgagaatcaaaggaccaggacagaaaagtgtcctgggtttggcaacaagcaggtcacgggccctgggtgtcagcggaggtgaggacaggagtgtggacacgtctttcgagaagtttttctgtgaatggcagcagggaaggagagctgtggggtcaaggggcatctttatggttttgaaagaaagacaataatagagcaatttaagagaagggagggagtgtatttatgagtgtttttgaagcatccgtttatagaacaatagcatgctcattccagacaagcacagagcacacagttctctctcgggtgttttgtaaacccatgagcctctgccactccatgtacccaaaccacatttcttaacaaatgcacttgaaatcagatttgtttcgcagattcagacaatggcctctcctgactttgtttcactctcaaagtgccttgagctcagaatgcagctccaggagggctggcagctctgctttttgcaccctttggaatgacatggaggctaggagcgggcctgcgtggcctcttgggtcctcccatccttgcctgcattgccctgtgccctggacaacccacctcgagacagggagcagcactgttctagggcagtgacctgaattgccccaacacgttccctctgcgtgatctggacacctcctggtgttgtcgtcacctgctcctccgagagggaggcaaggctgtagccgagcgccggccctggctgctgggacacttttaacaccgcctgaggtagtgcaaatattccagtgtgagatccggaggtgccaggagatgtgtgcagacaagaacaaagagccacgcctaacgcacacttgttggatgcattcaaattttcgggccagtttgacaaacacagacccatccaatgctcatggtaaacttgaagaataaataaatcacctatggtcttctccaatttgtaaaagaagagggcagagccccatgtaccaagctaactagggccgggctgcagcagggttcacatcctggctctgttgttcatcaactgcaccacgttgggaagcatttacctgctttgagctttggcttcctcatctgtaaatggtgctcatgctgctttctctgcaaggtgcagggagggtggcaaggcatggagagacagctaagtgcactagggacaacgaggccggaggatggaaggaagtgcccggggcacggcgtctggcagagagctagttgtcatctaggctgatggggcctaggggctgagcacatgcctaatcttaaagggctacttgggctgagtgtcctgcccagggacaaacagctggtccatgccagagctggtctggagctcctgaactccaggtagggctctttccaggagaaatcttggcttccctaaaactgggccaaaagaaaagatggggacttaaaggggtgccctacggatctcaacaatccttgtgaacagcctgttgcctttcgcagctccgtagggacccctgaattcttcaagccatttgctgcctcataaccaggcttgacctacatccctaaagcaggttgagccggcttatggaagtttccagagccaaaggcacagctgcagccccctccatgctggaaaagcttaggctttccccctggggccatgtagatgtctgaccccaaatccacagcacccactttgccctgagatccccccaactcccagaaccacccgcaggcccacatttccagctgcccactacacctgtcccaggtcatacctcaggaccctccaaaaggatgtggtcagaactgcaccccaagaccccctgctcagtgcagctctcatgcaggcccccacccatgctgcctgcctccctgcagccaggtagcagccccagaacccacgccacggcctttccgcagtcaagtcactcactccatcccctgcgtctgtacccccggggctcccctgcagtgctttccttgctgcttctgagtaaaacccaaacccacaggccatctctgagtgaagggtcttgctgagggtgaggacaaacctaagggatagatgcaaagtcctcaccatccagcccgtctgggggtccttgtgctcacagaggcccccttcattctgaggtccaagcttactcggtccccacgctcctttagctcaagcatgtgcttagtccccaggcgcctcagcctggaggacacccagctctctgggagtccctggggacatcctttcacaccctgacctcatcaaattaaccattctttaagttactcaagcttgaaactttggagtcatctctgcctctctgtcttcctgtccctgacacttcttcctaggcccagtttgaagtcaccttttctgtgtggcaccccctcagcacaccaacagcttcctcctaagggacctggaagtgtcctctgtccttactgctccatcctcaccccagcctcttcacgttgccttgtagcagtgttcagtaacggtagcagcacatctcactgcatggacgcctccatctcaatcgagtgcctcgtgtgttcttttctcttttaactcagacagcactttgaagattatcatccccatttttcagaggagagcagagaggtcaggcaacttgctcagggccacacagccaccaagcggtagaatcagtcctggaatccagatctgaccaccccatttcactgccttgcaggcagagcaggggctactctgtttgttttcttggtgcataactcagcacctatatggtaggatcccagtagatcttggtggaattgattccatttttgccccaactaacatgccaatcagagatccttcttccagagatgaaaaagaagaattttcaatgtgtgcttttcttgtttaagaacaaatagtttctgccgaggtggttttcaaagtgattgaagaagattattggtcatctgtagctgcaggagtctccttgctctgctatttacaactcatatttgcttagcaagctcttttttattttttaaatatttttgaatttctatttttagttttactgtggtaaggatactgaatatggatctaccctcttcacaggtttctaaggataaagtacagtattgtatccatagccataatgttgtgcagatctccagaacatatgcatcttgcataacttaaactttcacctattgattagcgactccccatctgcacttccccctagcctctggcaaccactattcgttgcttctttgaatttgactattttagatacctcatgtaaatggaattatgcagtatttgttcttctgtgactggcttatttcatttaataatgtcatcagagttcatccatgttgttgtatattgcagtttccttctttgtaaaggctgaatagtattccatcgtatgtatataccactttaaaatttttttcttggaggttaatatttgtacatatttatggggtacatgtgatattttgttacatgcatagaatgtgtaatgatcaggtcagggaatttaggatatccatcacctcgagtatttatcatttctatgtcttagggacatttcaagtcctctcttctagctattttgaaatatataatgcattgttgttaaccatagtcaccctactgtgctatcaaacattagagctgattccatctaactgtatgtttgtacccattacccaaccactcttcatctccccacccccacccccacccacacacacacacacacacacacacacattgttttatccatttatctgctgatggacatttgggttgtttccgtgtcttggcttattgtgaatagagctgcaatgaacatgagagtgctaatatctcttcaaaatcctgatttcagctcttttggataaatactcagaagcgggattgctggatcatatggcagctctatttttaagtttttgaggaccctccattttgttttccacagcagatgcaccattttgcatttctaccaacagtgtacaagggttctaatttctctccatccttaccagtttgtcttttgttttttttgctcacagccattctaacaggtatgaggtgatatctcattgtggctttaattaatttgcatttccctgatgattaatgacattgagcatcttttcatatacctgctggccattttccatgtcttctttggagaaaggtctattccaattcttagactagttttaaattgagttattaggttttttgccattgagttttaggagttccttatatattttggacattaactctttatcagatgtatggtttgcaaatattttctcctgttccatactttgtctttctctctgctgattatttcctttgctgtgcagaagcattttagtttgatgcaatcctacttgtctatttttgcttttgttgcctgtgcttttggagtcatatccaaaaaaaaaaaagtgtccagaccaacgtcaagatgctttttctttatgttttcttctagtagttttacagtttcaggtcttatatttaagtcttcaatccattttgagttgatttttgtatatggtatgaaataagagtataatttcttcttcgtgtggatatccagtcttcccaagaccgtttattgaagagactgtcttttccccattgtgtgttcttggcacctttgttgaagatcagtcgactgtaaatgtgtggatttatttttcgactctctattttgtttcattggtctatatgcctgttttcataccagtaccatactgttttgattgctgtagcttcgggatacattttgaaattaggaagtgtgattgcctcaagctttgttcttcttcactcaagattgctttggctatttgggctcttttatatttccaagtgaatcttagaattgttttctatacttctgtttttaaaatgcccctgggattttgatagggattgcattgaatctgcagattgctttgaatagtgtgaacattttcacaatattaaatcttccaatcaaagatcaggaataacacaaggatccccactcttaccactcctattcaacatagtactggaaatcctagccagaacaattagacaagaaaaggaaataaaaagcatccaaatctgaaaggaagacataaaattgtctctgtttgtagatgacatgatcttatatatagaaaatcctaaagactccacacacacacacacacacacacacacacacacacacaactgctagaactaataaatgaattcagtaaatttgcaaaaaacataatcaacatacaaaaatcctttctatttctgtgcactatctgaagaggaaattaggaaaacaatcttacaattgcatccaaaagaaatacttaggaatagagtcaaccaaagaagtaaaaaacttgtacactgaaaactataacatattattttaagacatgaaaaaagacacaaacaaatggaaaaacatcccatgagcattttataatagcattctaaggacctctttctcctgcccaggtcctcagcctaactgtgactatgagggctgcacacacaggaggggtgcaattattgtttatggcctgagcaaagggttgtcatctccccatcagctggtatctctgagccaacatgccaggctgtgggtctggcttgtctagagccttcattccctgaccctacaatgctctccacctcctccgcctctccgtgcctctgtgatcccgtggtgttgttgtgaggctcttctaggttatcattgaatgcctctctctgagccccttacttaaagtcctttgttgaaaatttctctggcaggggaattttcttttctctcctttttttttttgttttgttttttgattttttctgagacagagtttcactcttgtcgcccaggctggagtgcagtggtgcaacctctgcccactgcaaccttcttcgcctcccgggttcaagcgattcttctgcctcagcctctcaaggagctgggattacagacgtccgccaccacgcccagctaattttttgtatttttggtagagacggggtttcgccatgttggccaggctagtctcaaactcctgacctcaggtgatctggccacctcggcctcccaaagtgctgagattacaggcgtgagccactgcacccagccaagcaggggaattttcaacaaagttccatgcgcctgttttcctccacttcctctcatcctctctctcccctgaacatcccacctttcttctctccatccaatccccccagctcatccctacccataattccaaccctcctgtctctttggagtccagcagccatagccagaggtcaggagtggagtaaaggaggaaggcagggcgctttctgccaggaatctcccatctctctgtacccacctcctgatccccaccaacctctccctctggttgccccctggctcttctcccctccaggccccagaaatcccatctgcccctccctgccctttccaagggaagggcagggagagggcagatgcctctgaggggtgtctctgaggggtgcccccaagggacacaactggctgcgctcctagaggaggtgggcaggcacaggccagggaggagaacacagaggccagcaagtcaggcttctcaggaaatgaaattgctctgtgcaacaatgagagagccactttttaaactttttgcgtgagtgtgcattcaattgctcacattgttttggctccaggggaaatctgacctcggaaaaggctgagatgaagcgggtgtgggtggagagcctctgctatttcacagagtcaagcaacacattcttcagaggcacctttccaggcggaccattcctcctttcccaagagcagggcattcagctacccagcagaggccagggcaggacccactttggccagaagtgaccaagatagtctgttccccaggggtaacaatgaactctgatggggagcagagatttgctggctggatccatggggaattatcttcagccctgcaacttgagaagcttttactacattacaaactctcagaccccttcttcaaccaattaaaccaaacttcctgaaaatggggtttgctcggcagggatatgtaagctttccaaatgattctaatgtccggccaaggttaaggaacatagtctcagcatcctaggtgcattcagtgagcatccactgaccagccaaaaacccttgggtgaggggcatagccttaggagccagagagacctgagtttgaatcccagctgtgccacttactagccgtgggactttaacctcattcttccgtcttttgaaacctcgattttcttatctgtagcataggaatgagaataatactcatcctgtggctttgttttcaggcttaaaataagcgaggtgtttctgtgaagcaagtggcatatgacagccttgcagggaactgtcagtttgtgtgttgctgttgaatacaaaccgtgttccaggcatggctcaagagaaaaaaaatcgcaacacagtcagccccagaaagtgaggtccattctcccaacggggcatccaaggcctccataagcaaacacaacccctttctccagccaaactgctccacttgtatttccataggtggccttgcattcctcccaccatgagaacaatctttctcctcttcttgcctggctcttgcccaccttcagggccgggctcacttcccaccgcctcctcaccctgcctggattcattcctcttacaacatcctatagaactaatgtccacccggggctgtcaacgtctgtctccagatatgctctttgccaggtggctgtattaatgccttgtgaccctttcttggttgcttttaaatcatttcagtctttcgttgctacctggggacaggctaggtctcatctgtcatggaaccccggctgcatgttgctcggagtctgtgctcattcaacaagcaatgatttagtttgagacaatgcttcttattgaactgcgaagtttcctagtagtaccagaaggagggatataagttgtgatccttcagcgaagagcttgcaatcctcctgaaattaagcagccatgaacacttatgatggattgtaagctggatgaatgtggggaaatggaatggggaaggaggtggggagccgccggggacaaagggcaggggagctggggcttaagggaaagtggattgtggacaggcatgggggaaatggggaaagcctccaggaaggagcctttgagccaaggcgtgggggccagaataagcatggcccatctgggtggtaaagagagggcccgatgagcgagccgtggccagctccggctctcaccagaggtgttctagtgaatgcaggatgactccaagaaccttggaaaggttttaagccagaaagcaacaccatggaaggaacaaaggagcattcctttattcattcaacaaacaatgagaaaaatgctacttccttattaaactggaaagtctcctggacacattgcttgctagaaatgtgctgagataacaaagtcaactaaatctggagcagtctctagccagaggagcccacgggtaactcagtgcccggaggagtgcagtgctccaaataaagcgtgggcaggagagggaaggtgggagcccagatggaggaagaggcgaggaggcaggagagccacctcaaagggcatcccggcagagagcaactccccagctcctgattgcctttaaatttgttctgactgtaacggtcaaacaaaaagacttagcaggaagtgaagggctagaatgcagcttgaaaaatcaggagaacctttctgcatgaacagtttattccagccctaatcttaggcacagaccccgcctggaatgttcctctgagaatgtagccttcctagggccaggtacccagcccctgggcactggcttagcatcggagtccctgcagggccagcagctgctgctatgaataccccagcttaagcgaccattcctgtaacctccgccgaaataacttcccacccgctttgtcccctccagagctttcgttcccctcttccgctcagcacacacagtgaagttaactcagcggggtgacgccgacctacccagacccccacgccccaaacatacacacataaacacacggaagcggccccatctgaagctgcctggatccttgacctcctcaagatagaactggagtctcccacccaccccacctccactcccgaccctctccccagcccccaccctttgactgttctgcttccttagccagactctgcaaactgaaatgtgaaatttgaagccagtgttccccttagcaaccatggtaacacaggatctgatagagagcctagagttataaaaataccagcttccaccagacactggtttccaaagggaaaccagtctccaagccagaaccgtttttaaacagtcttaaaactcaagagatttctaaaccaatctcaacatggctcaggaggacatctctttaatcctgttttggaaggtggtgtgggtgcaagctttgggtattttctctgaaatacagagattcagaatgcatgtgctcacgggggaattaactagccttatgaagggtatatagcagggagcagtttttcctaataaacatcaactatttggcattttttcatagattgagctgccctgctgacccccagtgaaatcttccttccagttccctcccggggagtcctcagctccatccatcctcctaattagggagagagaatgatttcgcctatctccccttgcttgaaaacaatttaaattcacaaaaccattttccagccggaattctactttaaggcttaggtagggaggtaagagatggtgatgtcaaaacttttctgctcaggaccaacaagaaaagtcctacatccctgtccccagccctttctctccccacagacgcaccctcgggcatgggcccagcacgagctataaatccctgttctctgcgttccctgcagagggcacaagcctggcgagtgggggcagtgagggcagtagggggactctccccaggggaggggcaccttcccagcccccagccccgccttcgcagccctggacggcttgccctcccatctccttcccccgcctgctcctcctcctccctcttatctcctggggccatgccttgtaattttgaaaaatcttctgactgggtaattaatgtctgaacttcaagaggcccctgctatctgcagagctgagctgaaggtgggaggggaccggcagctgctgaaggcttggaggagggagggggtgcagattattttttctgagctgtttaatggacgggactggggaggatagaatcgtaccttgccagagttgtgggtacaagatgtatatgtacacaggcacaagcatccgtctagatttttaaatcctttggggtaatcctttggggttaaaatcacacagtaggatgccctcctgctcacacaccctcaccgtcccttagcagtttcccagcaggtggatggcagcaaacactaggggagccaggctgggggactttctgagtgcaggtctggttgggaggactggttgggagggagggacagtgacttacacatttcagagatcataaaccgggcactgggggtgcaaaaaatggccatcagttactccaggtaactcagaagtcaaaatataagcctgcctgtttcccaccttaagggaggatccaggcaactctgcagacgtctgcagtgcccccgacctccgtgcttcccagagtgggcccccgccttgcccagcctccgtgctccagcacaggtgccctccatctagcagttggggtgccgagtgctggacccactgctaggccctgggcataagcacgctggggtccctgtcctcacagagctgctgtctcctggggagaggaggagcaaacggtgccctgcactaagagccgagggtgaataaagcacacacagctctccaggacccctgtggatctttctccaaccgactccagctctcaggacctgtagctcaaattagcattgatgatatccacctgctgccattcttgccttcagatgtgaatgatgtttagggaactaacttttctcctcccttctgtccacctcaagaccaagccaggctccagctccttcttgatggctctgctctcattgccgccagcactgaactgtaggtcagagtgtgggcggggccaggccttttgagaaagaacctccaggatcagccttctcttgtagccaggaagaggaggggaatgctaggggaagaaggtgggtttcggaggcagacagtcttctgcagcttaccctctctggcccttgggtagatgtgttaattatttttgtttgtttgtttgtgttttgagacagtgtctcgctctgtcacccaggctggagtgcagtgatgtgatcttggctcactacaacctccgcctgccagagtcaaggattctcctgcctcagcctcctgagtagccgggattacaggcgtgtgccaccacacccagctaattttagtatttttagtagagacggggtttcactatgttggccaggctgatctcaaactcctgacctcaggtgatccgcccaccttggcctcccaaggtgctgggattacaggctacaggcgtgaaccaccgcgcccggccagatttgttgattataaattgacttcctcccttccctgtagctcactgtctgagaggtacaccacccccaaaaaacaaagacatgaaataaaaggatgggttcacagcatattttatattgtataaactgaagtgctgcttactgggaaaaaatgtggaagaacacagtagaataaggctcaggaccttggttcactctctgggagaaggcccttcttctaggtgcctgtccagggctctgctcagaagtcagtttctcagaccccccccgaccacgccccagcctgtccccccaccactgtccccagcctgactgccttctcttcattgccctactagtgcctggcttggagttttctttgttaatcgcttattttctgtctctcaactagcatggaaactctctcaaggcagggaacgtgtctattcacagctgtatccctgtgcctagaatagtgcctggtatatagcaggtcctcagtagatacttattgactgaattaaggaagtagagtgcctagactgagcaaagccagagacaatagtcagcccttctagaattcatctggaatgatttctcagtggagataaatccagaacccttgaaggggcaatgtgagtgagcagagtggggctggctggtagtggtccctggagatgagctcagaacgggaaagggaagagaaacaccccccatcaccccagcaagcaagcccaaaaggggcatttgtgcccacactgtgagtgaaccagtgcaaacagtgctctcagcctgcgaagctgcctctgttctgtccctgcctttggttaagtggccttttctcaacaaccctccaccgagcttcatatgagattcagtctgtccaaagtcagaatcccacaaaccacaatctttaggagaagtcaggaggagcttctagcaaagctccctggaccaagagcccatggggaagggattgttgtgggggcctgggcacctgctgtacactgtgacagcgctcagcagggccctcctcactgcccctcccatgaggaacggaggaagttaggagtatgtgcagggggcacgaagggtgggagaatggagtgggtgggaaaggacacccacagtcacagaccttgaagatgacggaaaccttgacaattacagcagaattcacctatggagcaacatgcccagtaacaatataacgtgagccacgtgtaattttacatggcctagtagccacattttaaaaaactgaaaagggaacaggtgaaattaattttatgctgtctaatatatccaaataatcaccattttaacgtgtaatcaatattaaaaagtaccaatgagatattttttacgttcttctcttttggtacgaagtctttgaaatccagtctgtagtttacactgaaagcagctctcaatttggactcaggcacatttgaagtgcccaagaccacatgtggcctgtggctattacgctggaccaggcggtctggaggcagcttctggaatcctcaggcttttggagcagttctggacccctaaagtaactggattcccaaagtctcaaaagtacttttcatagcctctcatagcaccaggcagcaaaggggcaccatgaatactaaaacctcaagctcacagccagtgtgcgtgtgggggctgcctggctggagagctccctgcagggtctggaaaacgtggtccttcttttttttttttttttttttttttaagacagggtctccctttgtcacctaggctggaatgcagtggcacaatcaggactcactgcagcctcaacctcccaggctcaaacaatcatcccacctcagccccccaagtagttgggactccaggtgtgcaccaccacccccggctaattttttgtatttttagtagagacggggtttgccatgtggcccaggctggtctcaaactcctgggctcaagcaatcccgcctcagcctcccaaagtgctaaagagggggaaaaggtaggaaagaagaaacacatagaaagggaagagaagggctgtggcaggggtggccagttgcatgacagggataagagaatccacggatagggacacagtgctgggcagggctgggcagctgccaccctctcctcacagcagctcgacagaaatcgtggccgagtgtgtggaaggcacaattagctcattcttgcattgccccttgattacacaggactaccatttctgtaattaagaccttctcccttactcagaagtattgaaacatgaaagtatttgctgaatctggtttcccagggttaaaagccagacttaggaaacgcaaacacacttgtggaaatgcaaacacacattcagtaattaattatcctttaattaaggccaaaaccctgctgaaaacaattagctctagaaattgaacagtaggtacagctccactttttgctgattgttctttcctgatagccaggaagtgctgagtctggggggcggaggtggtagggaatgaattagtctgccgcttttggtctggactggaccaagctctactttttttggaaatgttagtcagaggagagtttgaggtgtggggaagggcaaagaggatgtggtttgggcaaggggaggcgagaggctgccccaggcttggatgcatgccatgggaagtctcagaagctcctgctggccacacagaggtggcttgcctggctggagtggagggcgtgggccagggattagctgactggaaagcaattagatgaggtgcggctggctgggaaaatacctggaatcccagggccagagttgagacttgcttggctaacgctgcaggcgggaggcctcgtggggcctggggagtggaagtgcccaccagtgagggtgggagggtagccgtgtgggctgcgagtcttggatgcctcttgctgatgcggagaagtggatgagtacagattgtgtgggctcggaggtcctgcagccctctgggaaagatgccctctttcccatttcctctctctaaatgcccccctgcccccgccgccctccacctctcctcagactccttggacgttcctaaagcctgcctagtcccatcagatcacctcacccctttcctaggtaggaagatgtaggtgcacagtgtcccccttccggggactttcacattttgaaaggaggggtggggagagaaaaatgtgtggcccaaaggaacaaaaagggtgcttgggatttgggaggggtagggaaggtcactggcgccaccaaactctccccagaaaacacctgcatgcttaaaagcttacctagaacccccgaagcctggcctctggatggggggcttcccaggtaagagcccctgctctagaagtggaatgttaggttttcatacaggcaagagggaaggtctttattggtcagaggggccttccagatcaccctcaaagcaactgtgcaaaagattccaaatgttggcccagcgcagagcaggactctctcagattccaaaagcccctgacagctcattttttccccagaagggaccccagctcttgcacaaaccccttctctccccttccccctcctttcccctcccctcccctcccgttctcttcctttcccttctctctgtagatgagggtcggcaaatgtctggtatgaagggccagatagtaaatattttaggctctgcaggccaagaggcaaagccgagtttaaccacatccctgcgaggtgtagggcgtgagcagcagcatgtaaccaggagagcaagcgcctccactctgtcttcatagcggaaaaagcagccgtagacgatatgcaaatgactgagagtgactgtgtgccaacgaaaccttatttatggacactgagatttgaatttcatataatttgtatatgtcacaaaatattctttgatttttttccccaactactgaaaaatggaaaaaactattcttagctcatgggccataaaaagcaggccatggccagatttggccggtggactatagttcgcccctccctgatcccgctgtgtggttctcaagtgggaaacgctcctctcctccagatggtttcaatgcacattaaagtttgagagccactgtcataaaggagaatttgcagtttcccaggtgatgctgatgccgtcattagggggatcccacactgaatatgcccaatctagtctgaccttcaccctattttacagatggcaaaactgaggcccagaggcaacgtacctctatcatatgagcccagggaaaggcttctttgtctcaggatgcagagctgggtggttttctatctctagccgccttcagcgatctgccctgccagctcacactgcccaaggctctagccgagatacaggaaatgtggatgtgtcccccggagcccgagagcagcagggctgcagtgagtcatttcccgtgagtggagctggcatgcgctgagccttcctcgtgctgtcagttcgctcccttctgaccactccaacctgcgctttagaggaactccctgccagcttccgggaagcgaaaagcaccctctgtgagaagggaaaaaggaaagaaccaaggtttgcgtgtcagacttgcgtgatttcaaatcccatgttcgtggtactgcctgggacttgaaacaaattccttcacttccttgagcctcagtttccatcagtaaaatgagaaaacagcccctgcctctgcggggttcccagaagacctggagattaaatctgtccagtgtcaggcacacggcagggaatttttatggtgtctttattggccatcctggcattatgcattagccacaagggtacccagcctcaacctcaaaagccacagaaaaaggccacctgatcctccagacaacatgtgtggccatggctgtgctgatggtcttacagaggcagtcactgtcctacactcctgagacattgccattgacgatttaggttgtgctgtgtaaggctcatgtacttgggtcccttggtggccttcagggtctgagaaccctgaaattgtatgcagacatctgtgaacctgtgcagaggtgcatttttctgggagaggtgcagatttttcatcgagatcctcaaagggatccatgctcccaagaaagctaaggatcccacatctataagcacagtgcagaagggagccccagactttcaaggcatattcctggatttgagaatcagctccctgacccccatgagtggccttgggcacactggagatcatctgatctcccccctctggcgtggtccataaagcagtgatgggactatgtgaggatcaagtaggacatgtcaggccaggtgtggagaggggactgtgtgggagctgtcggtcatggtcccttcccaccaagccccccacctgccctcacccctgacttggctgccccctactcaacctttgggtttcctctgcagagaagcctgccctgatcacctcatccatccaaagggggctccctcccagctccctgtttgcatttgtcattctacccctctgccccccactgtaggtggcctggggacaggcaccgggctgtttggtccccatggccccaggccctctagcccatgaacatttgctgcaggaaggcacaaatgcatacccccgccctaggagccactgccttggagcccacccacctccaggccccacctccctcctcccccagcagctgcttctctaaagaggcagctcccactgtgctctggagcattcaagatcccagcaacaaagtcagagttaaaaagtatattctgtgcttctcctggagctgacgtggtcccatcaggtgccccctcttgagcacagccagcagcccccagagaggccctgggctgcccttcagggtccccatgctcagcctggtctttttcaaggcctgattctaagggctgtgtgggccctgcttgctctgcctggaggacagtggggtcaccactggcatctaggggacccctccaccaccctgctgccccctaagatgcgtatggggcaggccctccagcttctcacacctcaactccaaaggcctgggcgattatgaggcaccagtgagtgagatccccaaccaaccccatcacttcagccctccaggtcccaacatcccaccaggtccccctggactgccagcacctgccattcccctagaggggcaaggaagcagggtgggaagccccaggagactgccgttggtcatgcccaggtaaggattagccaggccttcctcctccactcctctcctctttgcctggtgcaggaacaaccagctaggagtcaggaaatctgagttctggtgctggctctgctgccacccaagctgtgcctctggtttcctcctgggcaccgcacatagatgccatctgtgagtgtgtcccctgcttagtccacatcacctgccatcagcctgctgagagggcgccggggcccagtgggacaccctgggaaattgtcagctactagtcctgcatccctgcccacatttgggctgtttgtcccttcccatcgcataaggagcggggaagggcaggaaactgaggcagccagggtttgacagcaaagcctgcactgcctggcctgggggcaaaggagtgaggtccagaggttacgagctgccaaggactggggacctcatctttctcctcctggctcccatccaatgcccaggggctggggggtctcctttcccggggcctcccatacacacattggtaaagggaggaacaacagcctcatggtctcggatccaaatcctcatccctgtgctcacgagagcccctccctagagcaagggagcactggtgcctgcctcacagggtgggggcgagaagggggctgtctaaggcccatcaagcatttagcaggggcctggcacacatccccactcagaggacaccgagaccactgttcatgtcacatccggggttcaaattctcagtgctgcaggaactcagaggaggaggagtggcctgggagctggggagggctgaggtctgggctgggggaagcacctgaaggcaggggtggaagctatgggcctaggggcacctgagcctgggtgagcccagcccaaactgaacaaaggcgattagagctaagaagagggtctcagtcatttatggagcctctgccactcccatccacctgaagagacatttttctcagtggtgcccactctgactgcaccagaaacacccagagatcttactatacagattcctaggcccccacagccctacatagccctaaaatcaaagagtgagggctggatctgtttctctcctaggtggatccagtacaaacacagggctgggaactacccactggatgcatccctctccctgctcccagatgccctgagcccctgccccccaccaacctgtcccagcagccctgggcaactgggtgactgcgaggctaagaatcccccacacccacaccctccctggtgggaagggagtggggctgtctctggaactctgatttggttttgctgtccaatgccagaacgggggcacactgaggaagagagacttttaaaaacaaagtccgtcttccctggggttttattttaccttggaaaatagaagaactgatttttttttttctactttcccccaaacttgctccctatcagtgtccctaaagtaggaagagttctcacttctccaagtgtgtagtcttggcattaattaaaatccagaaatgacagcaacaaagcacctgctttttcttcctgcttttctcccaacaccccggcacatcaacagcccgtcagcttgtgggtagactcacataggagctggagcctacactgaactttcatcccaggcgaaatgcctatcagaaggcaggtgcgctgccttcccaagccagtgccctcctagagttgagcgtgctgggctgcccacgcctcacgtgagcctctcggtgcagtggccgcctggaagatgtctcacctgggtccttgcacaggcagatactggagaaaatctgaggaaatatatagattgatttttgtccgcccccctgaaacgagtcccctttatagtcacacttcatagaaagcacaacacagacagcatgtctgtgcttgaggctgtggctgtgcacacttgggtgggctcaaagtatatgcattactgcacaacctttgtctccctcggggccaacacagagtttagtgtaggagccttcacttaggcactgtgttcacctttacagccttctccaacacttcatttatttggtggccccttaaccagaagcatatggagaagttgagggatttgccaagggacaggcagcaatagtgatttgccagggcaggccctgaagcctgtgttggtcacaggcagattcaagggcagcagcagcccccaaactctagatctgcatctcaggcccaggcacatctccctgacacctccccgggcctgcccaccggcccctcaatctctaagtgtcctagtggaacctgtcttctgctccccaagcctgcacctcctcccggagaaggacctccaggctgtgccggctacagccccgaggccatccctgactcaccaccaaccgccaccctgctgccagttcccagggtctgtgagcagcagctcttgcagattttcttgaatctggccaccacttttctgcctctccacggctcggctaggccactgtttcctttcccctgaattaccccaccagccctctcactggctcacccctcctgttctcagtctcaccctgccaccctctctctgagcactcctgactcacttttctccctgcctgtggtgtccttccctctcttcctctcctcaccccactctcctggctgtagcttcaaaggtttcttcccaggaagctgtccctgagcctcctctcctgacccaggtgagaacagttcttcccgtcactgaccccacagcacactctacactgtgccacttgcagcccactcagttctaagagccaccactgaccgagctcactgtgtgccagatactatcctaaacaccccacatcctcttctttaatccttgcaactacccttggcgggaggtaatattagtatcaccactttacaggtaaggaaactgagacacagaggggttgcctgtattgcacaacatgactggtggggcggctgaatcaggattagaatccaggcagtctcactttacagccttagttccaaatgctgatctgcttatgcaacatctgtcttccctcctagactcataaatctataaggccaggatctgtgcctccttgttgaatgagtgaatgaatgaaaagttgttactacccccttcagacaccctggagaagttggacttgttgtgctccaaggctttatgtcactggggggctgcatcccagggaacagaggcccttccgaatggcctcaccccagccagcagaaagccatgctttctttcaaatccaatcttcaggtcttccgagaggcccaggtggactcaagtgcctgtgtgagcagtgtgaagaaaagctagtctaggtagatgctagactagacctagaactaggtagaagcaacagttgctcccaggctgggagtggtgagtcttctggctacggaggtcagagaagatcagggaaggcttcctggatgaggctcttaccattgttcttaagggatctggtcaatggagccaagatcagaaaaggcatgctcagccaagagaattgtcagcaaaacccagaggcagataagggcaggatgcatccttagacctgtgaacagacgagtttgggtggattggaggtctgtgaagggggcaaggtgggaagactgtagggcccagagcagaagtggcccagcgagccgcctgaatgccaggctaagccctcatccccatgcagcctggtcagttgaacacagtgagaatgcacaggtgataacagaatattgactcacatgctcattcatccaaaaagatcatctcgacttagaaaaagagttgccccattattaaaatttatattctgctaagggtaaggctctaaagccaaacaaacttccaggtgccaattaacttctcttatctccgagtctcttagacttggcaaagagtacttaccaaatccctactgacaccctgggcagccccaggcccttttctcagcccaggcctgtctgctcctccaatgggtggctgctcctctgagcacaatgctaattatgcccttagcacagcccgattcttctctgaacagtaacagagcttaattgtctccggcccagctgtccctacccagttggtccttggttactgcattctgcccaaacccactgcagaaccagctgcactccctcacccaaaggatagccctccaacccagctcctgccacaaggcttcactccacccccacccccacccccaccccccccagaagatgggcacctctgtctggaaaccaggctactacaagtgttgatccttcttcaatacagcatgccaagattatcatgcaaaaaagaacatggtttaagcaaaggtttcttcaaaattccgtgcttggtggcagaggagtgggccagtgtgtcccttttctaagtcctccaatgacccttgctcgttatttatgccctccctgactcatgctctgtaaagtctgaggttggtaaaagccccctacatttaagagggcacctggttaatgtaggcatcccataaacaatcttctaagaagcttcttcccagtctcagggaactgtaggttggcatagccttgcagataatcttgtgcccagttggtgagcaagcaggggccagtggctggagcggcccctgggctctgggcatggggaggccctccttctgagctgatgggtggcctctgcagccgggccctccctgagcttccctctgggacagcagagaactcaacctctctgcctagggcagcgccctcgtggccccggctcagcccagctcctctagggaattgagtggctggactgtggtttagtcgcccccagggaagcttacccagaggaggaaaggactgtttcgcaagccaggcccggcgttctgagctggcctgtccgcccctggcatatggctgggcctgttaggaaatcaaggagacgctctgtctctttccagcaggcgccacttctgtcttgccactgctttgctcgattcaagacgctggctcgggggccaggctggtgggcaggcaggcgggcaggcgggcaggcccctctcccaccagcccggtgcctgggaagcgctcactgtctcctcagccggtgttatcccaggggtcccgcacctggctgataaggccaggcggctatcagtggccatctcgggtgggagggcagggtggctctcagggaaggattccagactgtttccttctggggctgagctccaacgcccttatctcctttcctgccaggcagggactcctcagcgctcacacacaaaagagaactccacccaagacgcacagcccctacctactggaaggtggaggaggctttgcctccggtttcattaaatctacctggttctcaatcgggggcagttaagtgtgcactcagctaatatcaatgtatttggtcctgccagggggtgggagggttggagagacggggacgttcaagtaatggagctgccttggtggctgttttcgaagctcctggacttgtcagtcaactgaaacgtctcttggaagagaaacaaccaggggatgggccaatgccaattacaagattcaggggctgcggggatggggaggtcaggcctcatgggactgagtagaacgagggtggtggggcctgagtgtgaaaaaccaggcctcgctcagccccgctcttggctgccttgaagcctgtgaggcaggaggcctggtgagtattattcccgtttcatagaacgcaggcctgtgggtgggagtgctagagggaatacgggaatatattatagaagatgggtcaacggaatccttgagaggtcagccgagcgcccattcctgttagcgcggaagggagagccctggcctcacagtgttcccaggattaatgttccgcctcagaagagcagcctacccccaagactctcagacttactgctgggcaatgctttccagaggccagggctggcctaggtgaccccacagggccttgttccagcccagcagtcgctgattctacaggcaagttactatgggaactataactttgaatttcctggctctggggctgtgaaaatcacaacctgaaccttccgttgatgtgggtttctcgattaatttcctgtttgattgtttactttagagagcggaaaatgcctttgcaggcagctagctccctccacggagacacttatcacaccctgcccccacagccagcaaggtcaagtccaggcctcaggtgggtggaggtaggggccagaagcaggggcagggactgggggaaggggctggagctgggggcagggaggaggctcagccagaagcagatggcagcctgagccccctgccctacccttctgcttgcccggggtcccagcctggtggatgtcggggctgtggagggacctgtgatttcagagacctgtgagcctttgaggggagcctcccacccaccccaagccccaggactggcccctggctgcccaaactatcccctgtctcaaggagctctgttgtgcagagtcagacatacagtgcagtccttcctggagagggtggcctcagtggggagggtcagagatttccccctaggccaggcactgctgactgggctgcccagtgcggggctgggcgtaactgctcttctacccttctctcctccatctgccctccccagggccctgcgctccagcagggagctgtgcccagtgttcccagtgaccataactccatcctgttccctgcggagtggggagggcttgcaggctcaggtgccgcctgcgagccaggagttctgatctcctgtgatgataaccacccatctctaggccatgggacactcggtagcctctcgagccctcctccccaccccagctacccagcccctagatggccctgaggccccatttataatgggggccctgaggcacggggaagggaaatggaataggccagagggctgtggactacccaggggatctgggaggcctgggaaaaactcccaacctcccagcacccctcccttatctaggtgaccgtatattatccacatcagggcagtttggagagtggaaaggatgcttttactaatgactttgagatgacaggtgaaaactggaactattccaggcaaacgagatgtgccatcaccccacctttggccggcctctccccatcagcctatttatgtgggcactcactggggagcaggagtgaagctatttttctacctacttgtgtgctcttggagaaatcatttccttccctgtgcctcagtttctgtagctgtgacatgaagagcgttgcagtggtgcctaactcagatcatctggtagaaagatcaaatggatctttaaaaacacacagagcacatagaacaaccactcaaaatatgtaagccaggtgagcatgaggattccgaaggtgctgttcaccctcagaggccccctctcaaaaggggaacctcagagctgccttaggcatttcctgttcactcctcaggagggatcttggactgggggcagtgagcacagaagaagcttccagaagggatggggagggcctaaaggggaagctgggaggcactggctgcaggcacagctgcttccctggagtctcaaacccaccccagggtcctggggattcctggctgcaggcactgtgaacagaactagcccctgtctaggccactagctggagcttggtccacaggagaagccgctggagttgtagccctgccttctggatccaatgtctccagaagaatttggtgtctaccctgagccccaaattatatttccagcccccgggccagctgtgggatgaagcatcccccatgtgacatccactgtcgctactttgtacggggtggtttgcaagcccggcaggaaggaggctaattattccctctggggcgcctggtccgcagctagggtgcccgcccgccttagttaggagggctggcagccagaccacagggcacaagcttggactgaaggccaggtcagaaccacaaatttcctgacatctgaccataaccaccataccaaggctccatgttagactggtggaaaagtggcatgggggcccattcccctctgctgaaggtgtctgcactgtgggcaggcaagagcgattaacataaaacagcactaattttgtagctttggtgccaggctaggcaacattagcatctacacaagcacctatatccatggccacaccagcccttcctcccacttcagagggcgacactactcttctttaaggcagatctatgtacttgatcctttcctcctttctgattatcctcttctcctgcactctggcacctcacctctacctttaaactggctcaagactctcctactttaaccacaccagattcccagaccattctaggtgaccctgtgccagtgtctttcccctagcatcctccccttttcttcttccataggcaagttccaaaaacaaagaaaagagggaaaggaaggaagagaagaagggggttggggttgggggtgggggagagagagagagaagaaagtacagaaattcattccaaagaaaaagaaagaaatggtgtgctctttctgtctgcacttctggacctccttcacactctccaaccctgcggggcccagcccaggcttccactgccccagtagcagcactgaagtcatcatggcaaaggtcacccatgctcttctaatcaccaaatccaggggaccttggtcattgttcgttttacttgacctctctgagctttgacactggtgaccttgtacttcttggaactcttggccctcatgacgccatttcctcctgttctgcttaactctctgaccacccttttcttccttctttggggattcctcttcctcctctctcaccctttaggcattgctgtgttcaggttgggagcccctgccgtcttctcttctcattccatgtgttctccaggtcacctcactcacaccaacggcttgactaatccctgggtgctgatgatcccagattaccattctcccattagtcatcttccctggtcatccccaaggaccctggactcagtatttctaacactgaactcattcactttccctaaaaccacctccacctgccttcccaatattgttgatggcatcatcacttacgcagttgaccaaaccccaaacctgggggctggccatcttctacctcatccttttcctcactctcacttctgcctcttaacatattctgcctcttaaatatcctcctcccttcctgccagccttaattcaagccaccccaattttgcacagcaaccttctaacggtccccctgcctccagtccaaacaccaccctacctacatctccatgctatgcaagataggatctttctaaactacaggtattactatgctactctccagtttaaaatctttcagtggctctccagtcccttgggataaaatccaaactcagtaccatggcatctagagcccttaaatatgtggcctttgccttctttataagcacattccacccccagcaccatatattttaggcatcttgaaatacttattcatcattgtactctgctagtgcacattttttgcttttttacatctttctcatgccatatgcctggagttctccaccaccgctattccttcttatgctgcaatgccatatacctagcaagtctcttgctttccccctactagactataaattataagtcttattgttcctcttgttatccctgtacttacgtagcatttaacacaccatagatatttcataaatgttgccgagtggatggatggatggatagatgagtagatgggtagatagatggatgaaaggatagatggatggatggatggatggatggatggatggatggatggataggtgaatagacagatgaatgaaaggatggatgggtaggtgggtgggtgggtggatgaatggatggatggatggatgagtaggtgagtagatagatggatgaaagaatggatgggtgggtggatggatggatggatgaataggtgagtagatagatggatgaaaggatggatagatgggcggatggatggatggatggatggatgagtaggtgagtagatggatgnnnnnnnnnnnnnnnnnnnnnnnnnnnnnnnnnnnnnnnnnnnnnnatgaatgaaagaatggatgggtggatggatggatggatggatgagtaggcaagtagacagatggataaaagggtggatgagtggatggagggataggtagtggccaatacagacaaagaataggtaaaatcagttcaattttgtgaaggctcaggttgacctgtcaccagtcaacacaattaaaaattatgagctccagccggacatggtggctcacacctgtaataccagcactttgggaggctgaggcaggcaaatcacgaggtcaagagatggagaccatcccggccaacatggtgaaaccccatctctactaaaaatacaaaaattagctggtcgtggtggtgcgtgcctgtagtcccagctcctcaggaggctgaggcaggagaatcgcttgaacccgggaagcagaggttgcagtgagccgagatcacgctactgcattccagcctggtgacagagcaagactccgtctcaaaaaaaaaaaaaaaaaaaaattatgagctccaaccagcaaaataagaattagctaatgtgggaaattaatatcattccgtaaaggagagagcacagatccaggactctccagcaccttccatttccacttagacctgctgtctgtctgggttgtgcaagccacttaactactgagcctcagtttctctaccaattaagcagatatgataatacctgtggcctttccctgtctccacaggagtgtcatgagggtaaaaggaatggtgcatacaaagcatgttgagatcttcagggaagatacatgtttataaagatagaaacatcataacaataataacaccttacgtttgaatcaagctttgcacttatcaaagctctttcacatacgttatttcaattgactctccaaacaatcctaggcagatactatccctgttctcaggtgaggaagctgagatgcagagtgattaagtggcatgccaggggctggtcttagtgtgtagcaggtcttctgactccaagcctgatgcccatttttgatgatagcctttcttggatagattatctacttccctgcctccctgaacggagacctagacataattggcccttttcttgatgactcgtcattaccataggcacagtccctgggctgtcctccaggtttggctgtaggtacaggtccaggtcccgcagaggcacagggtggatgggccagctgtcccggagggtactcctgacgtgtaggtggcaaccatcctagagccctgcaggtgtggttcttctgactctgcctcattcttccccctgtcccctttgtctccactgtcagcatgtgtgcccatttctgtggcttcctccgccaccacggcctttacccgtcactatcttttcttctttgtttccctctctcctgccctacaattctttccacaccttcagcttgtccccccacagccctggctcatccaccggcccagccagccaacctcagctcccaggctggctttgttctcccgccaatcacagccctctgcaaacctcccactttggctccctcatggctgcccctgtggccacctccagtcgctaccaaaggaaggaggctcctccaggcaggggctgggctgagctttttctgcagctgcattaggtggcttgggtttgctctcccacagtagaaggctgtgctgtgggtgagctgaggtggtcaaggtgggctggccagcccggcttggatggacactgcacccctcactagcaaggcaagatgttgggattgccagtgctcatccctccctgcacagcgaggctgccccatgagttctcagcaccccctttccctccctgcagggtggcatcccaagctaccagcctggttacatcctgggcatgccttgggcagcctgcctgtgcccgtggcccttcccccagggactccaggagactcccaccaggctgcctttctccctggctgctgtggggcctcccacagccacagcctgactggagcaccttggtttctccctgagggaggatatgatgggcgtgcccacaacaagtctccggcagagacaataggacaggaatgcattcgcttccgaacaaacactgtgtgggctcgcacaattgccttggattcttgtccaagaaacacattttgccgttcgagggcacgggaggcttgcctgccccagcccgcccacatccccgtcagtgccagagactctgatgagtgggctgctcctcccccgaccccagggcctctgacccccaggtagagcaggctggtctccttcatggatgcagctcgtcttccagaggtgacagcagaggagagggacagtcctgcccacacagagggtgcctgctcctaccaatgcctttttttttttttttttttttttgagacagagtcttactctgtcggtcaggcaggagtgcagtcgtgagatctcggctcactgcaacctctgcgacctgggttcaagcgattctcctgcctcagcatcccaagtagctagaattacaggcgtctgccaccatgcctggcaaatttttgtatttttagtagagatggggttttgccatgttgtccaggctggtcttaaactcctggactcaagtgatccacccaccttggcctcccaaagtgctaggattacaggcatgagccaccccgctcagcctgccatttttttaaaaaccattttttattggttaataaatacatacatatacatataacattatgtaaagcttaccattttaaacttttttttttttttttttttttgagacagagtttcactctatcgccaggctggaatgcagtggcacgatctcagctcactgcaacctctgcctcctgggttcaagcaattctcctgcctcagcctcccgagtagctgggactacaggcccgcaccaccacacccagctaatttttgtatttttaatagagacggggtttcaccatgttggccaggttgatcttgatctcttgacatcgtgatccacccgtctcgacctcccaaagtgctgggattacaggcgtgagccaccgtgcccggcccattttaaccatttttaagggtgcacttctttggcattaagcgtattcacactgttgggcaaccatccccaccgtccatctccagaactgtttcaccttccccagctgaaactctgtccccatgaaacactccccatcctccctcttcccagttcctggcacccaccattctgctccctgtctgtatgaatttgactactctagggacctcatagaagtggaatcatacagtgtttgttcttctgtgcctgacttatttcacttagcataatgtcttcggggctcgtccgtgttgtggcatgtgtctcaatggccttcctttttaagactgggtgatattccccttgtatggatttaccacttgtttatttattcatctttcagtgaacacttgggttgttccgcctcttgctattgtcagtaatgctgctgggaacatgagtgtccaagtcactgttcaagatgccgctaatttttgagatctgtgtttgagctaagtgaagctgttgtctcctggcgatcccaaatagaacatacataaatgagagagctagtcggccctctccgtactggcagggattcgtttatccccaaaatgagctgtctcttaggaaatcagagccctgaagaaatgggacataggacaggtcatttaggccaagatagacaagactggaaaggttcttcccttgggatgatacccactaaaggcaagttcagtagggatttctgggcagccattggtcaccctgaagcatggagagcccgggagggcaatggcactgacggggccccagggaggaagcctgtggagttgtgccaagggccccctggaagaggcaggccagacccttgttctgacacagagcagcaggtggggccttcagctgtgtgccccatccaagggaggctgagggagcatcctccaccatcccttcaccccgaagggtctgagaatccactctcaaaagccagcaaccaagcaggtgtgtgtggggaggacaggacatggtctgcagccaccaaggcccttcctgtgctctctgcgttccagcaactgggagggacaagtaagatgagaaactccttccctgacttccttgagaaaacccagcaggccgtttgcaagagggcctctcgcacaatgtggtttttggcttcatgcagactttcccaaacaacccagagaaagataaggttggaagggggggctctagggttgagaacccgcccccagctctgccttagggccctgggcagtctgtcctctgccctgacaggagttgggggagtagggggagcaggggcagtggccccaggagcctgcctgcggggagtttgggcgtgcccagggaagaaggcatgggaaggggaagtcacaaagatacgagaagggaagaaaaagagcagggagactgtggaaccgctctgcaggcccaagcagccccatcacagaaagtggaaggcacgcaggctgtgggctgcagaagagacgaggaggagacccttgattgtcagggcaaagcgctcactgtcaacacccctgggactccgggaggcttccacgcagccctgtcagcgtctccctctctcctcggagggagatgcagccacattgagagcctctagtgcctggcaggccctggctcttctcgaaatttctcatattattacttcacttgtccctaaacctcagaacctggcaggcacaggcaagggaccagagccccctgagaagctagtctcaggacacaccagggccccaggcgcacttccctccccgggagaagcattgactgagcagccccactgtgtcagccagcgacatccgcctgcggctgcttccccagctgccctcccttccttcgcatcagctcccgggttctgcctcttccccacccagggccaccacccactctgtctggagtttcattcccaccagatacttaccttccccctttcctgtgatttctaccagcaatttttattttaaggatttttttttcctgctaagcaccctagggaagcatatgagggaaatttactataagaaagaagttccagcctaggtggggtggttcatgcctataatttacctagcactttggaaggccaaggtgggaggatcacttgagctcaggagttcaaaaccagcctgggcaacatagtgagatctcgtctctagtaaaaaattttttaaaaattagccagacatggtggtgcacccctgctcccagttacttgggaggctgaggctggaagattgcttaagcccagcaggttgaggctatagtgagctatgattgtatcactgcactctgccctgggggacagagtgagaccctgtcttaaaaaaaaaaaaaaaaagttccagcaagaccacacagaattctcctgatgttaatccccattttccctgctgagtaagtgtggctaggcccacctttccctccgatcccagtcccagacagtcacaggaccctcccaggccctgaaccagcccctcgcagttggatgttggaccccatgactcaggtaggcttgctgcaggatgagtcacaccccccacctccaactttttctagaacctgcttactaatctttatcccggcctcttgggtcctctagatgagggagaccgttgcctgtggcccaagaaagtcccccaggcactgactggtggaagcctcccttggctctccttggggatccgcagaccccagtgcgggagaggggtcactgccccagagtagcccacatgggcatactgtaactacttaaccagtccccttgttgggagaggtccaggttactttcaatcttttgctctaaaaatagtatagcaactagtgtacacgtgttgtatggcatgtgtgtggttatatgtgtgggataaattcctagaagtaatattgctgggtcagagggttttggacacttctgttgttgatgattatcaccaaattgccatctatagagtgataccagcttgtatttctacaagcactctatgtttgcagacgcatcgataataattctgtgccatgtcccttctggtgacaggggtatggggaggggtaggtaaccacatccccctcactctcatcttttcaaaggtacgtgcatcagagggccttgcaagcagtctctctgggtgagcattttcctttcctgtcacagactctcagctgggcgagttttctccctgcctcccaaagcatgtttctgagcaaatattttccagtgtgtgccagatgttggggagagcagtggaccgacatcgccctaccctcatggagcttgccttctagagcggggagacgggcaataggcaaacaagtatataatatgtcaggggccgcagaaaagggtgagctgggaggtaggtgggggatggtggctgctcagggaaggcctgtctgccctggggatgtttgggcagagccctgcataggatgagggagtgaggtctgtggatctgcggtggccaagaatttccagcgacaagtatgcagaggcccagagttggaaatatgtgggtgggatgcgagaccccgagggtcctcagtgcctgtcacgtgtgcagcccatactgttccctcccctgggttgaccgttgctctccacctgctcatcatttgagcagtttaaggcccacctctgctcactcatcccaaaacgatttcttttctgtgtatctgctgcaaacccagttctcaggccagttctgaccaagttaccaaggagaatgaggtctggtccctgaaagtggctctggccaatcaagcactcctacggccctggagcctgcaccctagtttggcctgcagccaagcctgccgtgggtcctcagctcctgtggtgaatgctgtagctcctgctgcggggcccctaggctgggtggatggatgcaacgtgacaggagacaggaagaattaaggatgtgcagaatgcagattttgagccagcaacatgaccagtccccagggttggctgggcatgattttgcctctccttcttgactatatcatgcccagattaaaactttggctccagctctccgtgagtaaatgaggatgtgccctcagaatgccatcttttaccctcttctcaccttctacccttccttttaaaaatgcaaaaaagaaatgcataaatcatgttgaccaacagttcatgaatccccactgttgccaggggctttgcttggggttaaagggcagcagagatgaatttggcactgtccctgacttcaagaagccgacagttcaccctggaaaatgtcttaacttgtgtggaatgtgcatgggggggaaagcaggagtgcctgggagtgagaagcagggagggcagggactggggtggtcaggaagggtccgaggaacagctgggaagtgacccagccttaaaggatggagagaggatggagagccccaaagatacaaagtcatttggagtctaaacaccagctatggagtgcggccctttaacctgcatgggaagaagtcatggaaacccatggctttaaccaaagaggggcctgaagtagaaatgatttctccctggccccaagctctcaccttccccatccactctagaggcaaacgtgtgcaggcctgacccgtcttgctctctgcccctgctgctgccctaggccacactgccaccatgcctggccaggtccctcaatgtccacccttccctcctacagcaggcagaatggtccccttaagacataaaccaggccaagcatggtggctcacacctataatctcagtgctttgggaggccaaggcaggaggatcacttgaggccaggagttcaagatcagcctgggcaacatagagagaccctgtctctacaaaaaataaaaaaaaattagcagggcatgatggcctgcacctgtggtcccatctacgcaggaggctgaggacagaggattgctcgagcctaagagtttgaggttacagtgagctgtgatcaagatgtatacaatgtggagtgattcaaccacactcattgacatattcatcacctcacaagtgctgctttgcatcacagtgcttaccgccatctgatagagatgtttattggtttgttttctgcatttccaccgccccggagctgcatttccaccgccctggagcagggcctggtctgtcttgttctctgcagtgaactgtgctggcctggcgcaggcgctcggcaggtacttgtgactttgtctcttttgttttggtagatctgtgctgctttcgaagtgccacctcggcatctctctacagtgtgatcaaggagacctggcatctggaacaggactgtgttgagatcagagagacccagtctgtagtctgattgatctctactgactttgaggttatggaagttgtaggaaggttgttgttatggtttatacagcatgtagtatattttcattcattccacattccactcaatatttgagtacctactagacatagttcaaggatttctgtacatgaaatgtgccaaaatgcttctccataaaagcagtgaatcacctttgcatgaattgagttagatgttggttactgggctcccttgagttgtgggttaggagttaactgtggcctgacctggatccctgtgactaggtgatgctctcgagtttgccagcaacagaaccgtctctgcgtccaacatctcctaagcgggacagtagcgtgggctgtggcatgctaggaagatcactctggccagttgtgtacaagataaattgcaggggaaggaagtggggaccaggatgacgcatcaggacgcgggacagtcctccatgagggaagcaacaaaacctcacctttgagtaaggccagggacctggaaaagtgggactaaaatgtctccaggacgttttaccaggaaaactaccagaacctggtaccttcttggttatggatggtaaggggagagcaaaatgactgaggttttgagctggaggtgacatggagctgctttgaggcaaagatgataaagccatagtgtcatccagaaagtgaagcccaatgagtgtgggaaggttcgtgcagacgagctagatgtggggtccctgagagtcgtgatgatcgacatggcaggaggggacggcattgagaagagcagaagcttgacaataactatttggggaggaaaatattggaggaatgcctgttttaggaactgagagaaaaagcattagccagcaaagagggctgtggtaggagtggtccgtggggcttggtgagcttctcggaagccacgcccagagagggtttcaggcactcggtgtcagcacaccagtgctgctggggcttcaagagagagtgaatcagaaaactgggacatagcaagcattggtgaggctgtagagaaaccagaaccctcatgcattgctagtgagagtgtaaaatgatggagccattgtgggaaaacagtcttgcagctactcaaaaagctgaacatagagttaccacatgacccagaaattctaatcctatgtaatatccaggagaattgaaaacatgcatccaggaaaagcctggtacacgaaggttcatagcagcactattcctaatagctaaaaggtggaaacaacgcaaaagtccattaacagatgaatggataaacaaaatgtgacatatccttacaatggaatattagtcagccacagaaaggaatgagatactggtatatgctacaacatgaatgaaccctgaaaacattaagtgaaagaagtcaatcacaaaaggccacatattgtgtgattctatttctataaaatgtccagcacgggcaactccatagagacatagaatcggggggagttgccagaggctggagtgaggaggaacagggaatggctgctagtgggtatgggtttgtatggggagtgatgaaaatgttcagaacttaaatagtggtgatggttgcacaattctggggatatcctaaaaagcactgcattatatactttaaaatggtggattttgtgttatgtgaatggtatctcaatttaaaagagacagagagattgagagaatgagccaggcaagtcgggggaagcatggactgtagcacggcaggactgagcgctgagcagcccagccatggccctagttaggaaacagttccagcccctgagtaagtccacaggtttgtgggtttgaaagtctacagcactgggccagtggagaagagggctttgactcctggacttcctcctgtggccagggcccaggggtgcctgagtcaatggctgaacctcctcacccatagaggagttaccaattatacgtctctaagctaatttcatttccctgaggacttctgctgaccagttgttaacactggatgatcccagcgcactcactgctgcaggctttctcttcagtggcctcttgaatcacggtgttcagacctggcccaggggctccacatcgcaccatcacactgacctccagctgctctaaccctgtcggagaaatcacggccacccggcgcaactgactttctgctctctgacttttgtgggctctcactctagcctgaaccttggagatgtttgttacaggccgcatcagggctggggctgcaggtcggcgggggctgcagggagctacagggcccagtagccggcatgtctccttcagtggtgctctctgcccctctcttccacagctcttgcaatctcaggatgtgaaggaagatgctgtcctttgctgctctatggaggtaagctttggggcttcgacatccccaacctcaaagccggtgcatctctcatgccttaacagttctaggggcacgagggttgttggaggcatttacaagtccaggggaaggtaggtggatggcttcaggagtgggcatggacttctgcatccagaattatccaccccaagccagagtgaacactgatggtgagagcagctcacccctgactgaagggagagagaagtgattcccagtggcattgcctacttccctgtcccccaaagaccccctgcgccccagctcaggcatgccacacaaatgacttaagaagttcctgattacctctgccctcaaatatttccctttgctttgctaatgcttggcaatgcagtgctggcacagcccacccgaaagcacacctcttgggaggtgccactcctgtccctaagctgtggcccctgctaatggagactcttcctctgggctctccctttagcgcctggctttggcccagtccctgggcagatctctgccctctgcagatggtccagagtcactcagagtgggatgcaggcaggagaggggcttccagacgaggacctgggcctggcagctgtcataagcatactcaggtggcttccgcctggctgcaaaggcctcactgaggagctcagaggccagaagcactgggagccagatggcagtcttgggtctgtgggactcagtttgtttgttggcctccagctgggcaccctacagggggcttgggattaggggggaattagggagaaggagaaagcctggtccttgccctcaggcagcttccagtctggttaggaatagctctcagagagtagatagaataagtgtaagtacagagacatccctgaagagtcaggggagagaggtcaggaagggctcaggggttcaagggaggctttgtgaagaaggcagagactagaaaaatgaatgggacaaggctggggaccgagacggggactgagattctatagagagggcctggggggcactggccaggggtgtgctggtccaggaataggggctccttcccagtgggcttttcaagattatctagggctctcctgacggcctctggctggccttcttccccagtttgtatttctctcccccacttcctgtcacaagcatgagcagaggtcacttctgggggctgggagatgggatcaggatcaggagaaaaggagagcgagagaaacaggaggcatcacccctgctctcaagttccaatggacacatgtaataatgactaagctctttgccagagagacgccccagcaagtgaaaatgaccacagggccccctgatcaccaaggggcacagatcatggagccatttgagggtgcggatgtagtcagggaaggcttcctggaagagggaggctcttgggtaaaagggacaagaggcatgttcctggtgacagctctttcagccctgggcagtaggcaatattcggatccctctggatcctgctggcagattggttggtaaatgtgagctctcactcttggctactccaccttccactctccctgtcctcattccagctgtggcacaggggtctgggcctgtgtgtccttaagacaacccagctatttcctatccctgcccacctaatcagggtggccagtgggccactgtgggacccgaggccatcctaaccccacatctctgtctgcagctgcagagtacaggccggctgctggaggaacagctgcctgagatgatgacagagctcctggccagcgcacgggacaagatgctgtgcccctcggagtccatgctgacccggtcgctgctcctagaggtcatcgagctccacgctaacagctggaaccctctgacgccccccatcacgcagtactacaacagaaccatccagaaactgacagcctgacagccagggggcctggcaggcggcccacgggcagctggggccctggtgcacagggccagatggacaggcgggaggacaggggtggccctggcgggagaaagaaatggggaggagggcaggcagagtcggtggccagtctggagccagacggggaagggagcaaatccctgagaggagtgcccccgcacaagccccccagcccgagcatgcaagctcacaccaataagggaagcatgtttctttttcctggtggccctggccctccccttcctcactcccgcctctcccctccccatcagacccatcccccacggagctttgtgtgagggatctcatcgctgtgactcctcggagaccttggcagcctcgcacgccggggcaccgcttgggtcagaaaggacctcggaaggctgaaaaagtgggtcggagacgggctcgcattgttcccgcatgctgtcagccgcagtcgccaactggcagcaggcgacgtgtagcagatgtccgggaggacaaaggcaggcacggtccccaccagccgcccgtaattgacggcctttgtcagccatggcagagctgacgctccacctcccacctccaagtcctcctcactgcagcccccacagcctcaggcctagggggtcaggcgcagcgggggagatggagtttgcagttccacttgcactcttttgtttattgtgttttatttttcaaaagtcggttgctttgaagtctctttggccaatgaaaatgcccgtgatgtgatcacacagtcagcactgttgaggacccccggattagtgggagatcaaacccagctcccctctagaagaaggattcgagccacagacagcttgccagtagccaattagggtaattggaaacttctgccccggcggggggtccccgctggaatcctgtgttcctcgccactggcttccagcgcctctgttttctcaaagggctgatactgtcaccactgggaccaagttaaacctggtcctggccccaggggccttgtggcaaacagggcacagaacgagactggcaaattaaaaccaaaattctagatggtgtcttgcgctccacacgcaggtcttactggggaaaaggatgggagtgggggctccccaggactcgattttagctaatgcgctgtgtcactgccccagctcggacgtagaagcccagccctccgtgagctcttgggaaaggggtgaattcactgggtcatggaagggacagtcaggtgaccagcggggtcgccagatgaagcttcccagccgggaaacaagacggggtttcttggcaggccctggtcctggggagcaggccctgttgttggctggagaggaaggtgtggggtggaacaggtgtccacatagctccatctctgggggctggagcacacactttgatgagcccccccggaaatgatgtcagagcctagccgcttccttatttgctcttttattgaggccgggcaggccctgggtcactttggaggcccctcttggtccacactggactggccgggaggtgatgggcggggaaggttctcgtgattgattgattctgagtctgagagtggcgagtggggagaggcttccccagttctctccagctttccctgcagctgcaacctgccctctggtcccaggtgtggagcctttgcctgtctctaaaaagagcctgttggcgacaaggtgtagggggcacaagtttacctgaaacaggtcagtggtctctcccaagaagcgcacgccacctctggtccctggccctgaaccctgccttcttcctccctccacggtttcttcccagactttctcaagctcctcctcactgcccttcctccccagcccagcctgggaacacagatgccccgcgggtaggaggcctcgagggaggagccgggctgatgcggggctgctcagggcaggccccagggcgagcttgccgtcgtggccaggcagcctccacctgtgcttcagtggcccctgcccccctgaagcatgtggggtttgtccgctaggaggaggcaaggcccccgaagagaggagagacctgggagtgggagctcaggtcagggaggaggcaggggagtggggtctcccagacccaacggtgagctcagagcaagcttcacgcaggacgctccgaaacactgtgtggagggggctgtgttgtgggcaccttggggcctgattctccttcctccgaacgggctccttgatggcctggccacaggggcagctccccattggctgttaggaccagagtgtgaagaagaagtgaaatataaatatgtatacatatataaatatatttttaattacatgtcgtgtcacggtggctccagacatactgtttgcctagtttattccactgcttgaaagcgcttcctagccaatctgaacaacaacactttaagctgtttttctaaatgcaggttgctgctcctttttcagatatggaaggaaaacgttaagactattttttttttaaagaaacaacagtcaagcctaaaatttgagaccccgaggcagcttcccgagggagactgctcagacaggaactgcaggacagaagtggatgccccacagaccctggccccctccccaagtccatcccctctctgtggcatgaggaaggccgcgtccgagttgacctctgaatgtatgtgatgagaggcagagctggatattgcatttctaaggcttgcattgctttcccctcgcccgcggttcttggcgcatggaagaggcggtccagccatctgatgttgatcctgtctcagtctccccactgcctgtcaggatgagttagtcattgtttttctccgaggcggcctgcttgccacagccctgctccccaaggcctggtggctttgccgaagctctgggaccgcagccccagcgaggctcccaacctcacccagacgaggccaggagccccgccaccctccacgggatgtgcaccctcagaccccattctctctgttcgtccttccttgaccagtctgtaaaccttcactgtttggggatcgtcctgtccatccatgtaaatgtaaatgttggccgagtcggtatttattctgatttttattttattctattatttttctccgagggatgagggtggggggtgtgggaagggtaccacagatcaggccggggcagctgtaggggcgggggcccagacagccaggccgccaccagagcagccccatggggtgccccagacgcgggcctccaagaagccaagtcccagtctgttttctggcatcagacaccggcccgtgttccttgtcagacagacagactctcaggcctgcctggggagtcgtgtccctcagctgcagggcactgtgttgggaaaccattggctgggcctttgaggacacagatcagaagaaagaaagacaactttcctctgcgcggaacactcacacggaagggctggccgcctccctgagccggctgggagtggacgacaggacctacctccccagagcaagggcctggggcttcccgccaaagctgccgcggaaccccgctagtgcgaccaccctccctccgtcggtatgtcctgctttccagctgaacccaaactacaagtgggtttaaaaaaataaacaccaccaccaaaaacaaaatgcccagagtctgtgctctttgtgtgttcagcaaaagaaaccttttccccaagctcatgtgcctcagctatactagcagggcctccaggagctggcccaggagatgagctgaggggaagattcttgcaagaagttggtccaggagaccatgggtgaaggagacttacttacatcccccaaaactgggaactaactatgacctatccaaagtgacctggacctgtccaggatcaagccagtcctggacaaaatggcttttgcactaaaggtttggtttaaccaaccccccccaaacctaccccttccctggaaatgtcactgtggcatttggcaatgagtcatttcaagagggctgagatttgggcccagtggctttcaaaagtcaacagcgagtggctgtccagtcccagttggtcaaatgagtctttcatcaacgagtccccaaagggcccagtgatttcttttcctgtgatgacatgtctcttgttttgcacaatcttgtctatggcaaggcactggggacactgtttcctggtaacgctcccctttccttggggattctttctggctagaacttgctggtccttcagctccttgcaggggtcgcaccagagcaccaactcccttcctccttccctggcctggctacaatggcggccagggcctcccaggagccgggtgaaggcatgttgagattcgggccttgcccttcactgagtcacacacccaccatgacactgacagggacagccagaagtccacagactgggtagagagagagaacattttaattaaacaaacaactgaggtatgtggcgggccaatttttttttttttttttttttttttttttgagatgatgatggactctcgctctgtcactcagcctggagtgcaatggcacgatctcagctcattgcaacctctgcttcccaggttcaagcaattttcctgcctcagcctcccaagtagctgggattacaggcacacaccaccacgcctggctaattttttttgtattttagtagaggtggggtttcaccatgttgcccaggccggtcttgaactcctgagctcaggcaatctgcctgccttggcctccgaaagtgctgggattacaggcatgaaccaccgcttccagtcctaatttttgtatttttagtagagacaagttttcgccatgttggccaggctagtctcaaactcctgacctcaagtgatccacccacctcggcctcccagggtgttgggattacaggcgtgagccaccgtgccaggcccaaatttatttttataaaaatgcaaagcagtagaagcagacattggaggtcaagatcaaaggtagggcgacgatgaggaacagagagccttatcacaccctgcaaaagagaaaggagattttcctggatgggctagtcctgcttccagaaggccctaagttactgaatactacgagacacagcatcgaaataatacatgtttcaatcctgatttcaccaccatctttctgcttgtaggcattctcttgtcattttagagtgtttgtttacatttgtactgggatgctcacagcgtaacttataagggccttttaaggaccaaggcaaagatgatgatagcagaaaaataaagggttgagcagttgaaatgggaaagaagtggtcctgccttactgatctccctcattcctgcagttccgcagcggcttccttacacggtctcagctggtcccgtgaagtaggcagatgagtgttttcgattcccattttatagatgcgccaaaggctgatcaccagaagagccaaggcgagggtgagcccagaaagtgagtgggtccttcagactcctcatccctgcagcgccccagggagccagccagtcacaccagccagacaaaaggagcagccagctgcccccgggactcggcaggctgcgggcaggccacgtgggcttcccgcttcattggtggaaactaggaccatgatgaaatacctcagatcaggagatttcagtggagtgggcagaaggagcgatggtgcagaatttggtgccgttctataaaaggacccattatcatatgtgcagtgtgtgttgctggatcccagtttcccccaggccagtgagggggaccctgatagggggacatatcaagcatcagggtcaatacccgaattgcctgggaacattttcaaactacatactaaaacagcacacacatacacaccaatattttcagaatttgggccttggggagcccctcttcttactggtacatgtgtgctatgccttggatgggtgcaagagaaaagatggttgagagccgccatccatcactcctggaacacagtacgatgatggccatggagagctgtcataagtagtgcagaattattgtctggggacagcaggccatgctgctgtgctcttttgcaatctcagggtctgccatcttggctgaaacaacactggctggcacatctgcaacatggggcaggggctctggcaagttgcttgaatgtggaacagaatccataccatggactcgggctgcattctcactcctatgggccttaggtacttttgccttcataggccccttcttccatttaaaaaaaaaatggaaatattatgactacattggtaatagagacaaatatattatttttattaaaacattttctcccacctagaagttcatttttttacccctgattttaaaaaaattaaaacactttgtgggcccctaaaaaacattttgtgggctcctgtcttagtccattcaggcatctgtaacaaagtaccatagacttggtggcttatgaacaacagacatttatttcttaaaatactagaagttggatgtcccaaatcagggtgccagcatagtcatggtctggtgagggcctacttcccagtggctaatttattggatcttcatggcagaaagagagtaagagactttgctggggtctcccttataagggcactaaccccattgataagggctccatccctctgacctcctcacctcccaaaggcacctcctaataccatcatattggggattaggatttcaacatatgcatttaggggacacaaaaacatgccatccatagcagcaccctttgtatatgcctaacaggtgtattggccctacctgagtgtcatctgagctgggagtcccacctttctctgctgcccacctgatctctgggtgactcagggctggggagggggagtggttcaaaagcagtcttccaaggaagcagttggcccgtgctggaagcagatgcagtagctgcctctgccctggactggctgccagccagacagctccaagcgccagccagagcagctgtgtttgccgcgctaaggaggctggcccctgagagcccgattcatcacacagcactttctcccctctgcagccctttagcacacattatctggttacggtctcaccagagccccgtgaaagaagtaaatacaatgcttatatccatttcaaatctggggaaactgaggcttacagagccatcccataggtttgaatggggctttatagtctttaaatatatgactatgttcgatccttacgacagcgctgccaggtgacatgtttttgacaccattgtaaagaagggagacaggctcacagaagcagagtaacaatcccatgtcatgggacctgtaggcacaaagaccaggcctcgaattgctgccttcttagtcctaagatgggactggtgggtgggtatggggaccaggctgaggacccaggccacctttgtgcctgagtcccctgatccaggcctgtggagtgcaggtctgtgcttcctgctcagtgtcccataattctaactggtctccatcttcagcctccccattcactgggcatcccctggctcccaggcagagtcctgagtctcctgcaacccatgggggcatccattccatgggtggaatcagtcccaggtgacagattaagtcttacaatatggccaggccaggcacagtggctcaagcctgtaatcccagcacgtcgtgaagctgaggcaggaggatcacttgagcccaggagtttgagaccagcctgagcaacatgacaagaccccatctctacaaaaaaatatatatatttttaactagctggtcgtgatggcacacacctgtagtcccagctactcagggggctgaggcaggaggatcactcgagcccaggaaatcaaggctgcagtgagctgtggtcgcaccactgcactccaggctgggtgacagagcaagacctgtctctaaaaaaaaataataaataatatggccaggaggccaggcatggtggctcacgcctgtaatcccaacactttgggaggccaaggtgggtggatcacttgaggtcagtagttcaagaccagcctggccaacatggtgaaaccccatctctacaaaaatacaaaaaaattagccgggcatggtggcgcagcctgtaatcccagctactcgagaggctgagacaggagaatcgcttaaacccaggaggcagagattgcagtgagccaagaccgtgccattgcactccaccctgggtgacagagcgagacttaatctcaaataataataataataataataataataataataataatatggccaggatcccacagctgacctgaagcagagatggttcaagggtgatgctctgtctcctagtctcatcacctgtgcccacgtctttcaagtgaacccctacttgggtcccaccttgtgctgggggtgctataaggaaataagcaaaggagacaatgccttaaccaccttggcatggtcagtctcctgggagctggaatttccagacaacagacaacctctcataggcctagcccaactctgggtaggtcctggtgcagggtccctgcctgtggcatctgctgtgctacagagagccaacacctggcccaggccttccaatggggaccattcagggcttgacgaagcttcactttccagccccagagaggaaggaccaccattcccctcccttcccagaacaaatcaggtgaaacccaaatacccacctaggccaaaagaagaaaacttccagtgggaaccaagacaggctagcaaggtgaaaagagacttattctatagcatttcccccaaataacaaaagtgtgattaaagcaggtgagaagccaattttaacaacacttgtatgcatacacagacccttgcaattctgcacactctaaaatcttactttttgtggcttagaatgtttcagcactcagtggagtttctgcagccagcagtcacacctacagagtttcaaatccgtgtaaacgctgtgtcagcctaaccaccagtgtgattctgtgtcattcgggggcaaatgttgatgtttcttgggtaagtgaaagatcatgcagagagcttccggaagaccatccttaggagctgaactgaaagaaggcctctcagaggggccacagcctccttctccctgtgctagagacaagtccctaatagccatctatgctcaatgggactcaatgtgtctcgggagcctggaagcctttttctgccccattcctgacatcatgccacctacacatcagacacaaggcacccggcccactccatcacctccagttcccagaaatgtgcagggagctcaggtcagggctcttgaatctcctgctgacccagcagaacatacgacacaaaggcatctcaaaggcaaacaaaatgggtgggagggaggctcatggcccaggcgcgtcatcagtgcagtcctgttcagccagggcaaggctcagccgggtgcagcttagaggaaaaggagaagtgctgaggctgagcaggtggggagggactgtaactcatgaggtgtgtcgccagattggaaagggggctcagggtccgtgttgcctagctactgccatgtcactgtgtgactaacaagccccaaatctcaggaactgcaacacagaggttcactgttcctgatcacaggtctgcagatgggctgtctctgatccacaccatggcctccctttctggtgagaaggggcagagctcagcatgcagtgagtcacagaagttagaaagcacgtgcctctgtctactgccacctctttcaggaagctctccctgactgctccctagtcagggttacagatcacccctcggggctcccacagctgccagggatgttctgccacagtcctgctccctgggcatggccattggtgtgtagatggcagatgcctgctgaggatgagcgtgacttcgtcccctctgtctccccagcactaagccagggcctggccccagcaggtgccccataagcatgtgggggatgaagggaatggtccaggtactaagggactgaggggcttggggagggaagagccagctgtgcctggagccacatactcgaggcagggcactcagggccagggaggaatacagggtggggcacgggcagggccttccagtggggagagctgggggtcctcaggggcctgatgtctcactgtctagagaggcctggaggtgggtggggagtgctctgtggtcatgggtgccagagtcttagccagtgcggagggcaccttcgtgccagttaggaggtgcccttcctccaggtgcccagccctgccccagaaccctgggagctgcctcagacccacagctgggcacccttgtgtaggacacaacctgggcgctgcatgtgagactctctgggtgtggagtgtgactgtgttgtgtggggtgcgggatgtggtatatacgcacacacgcagggagcgaggtatgtgtggttggagagggttgcgttgtgtgttgtgtggggtgcgggatgtagtatatacgcacacatgcagggagtggggtatgtgtggttggagagggttgcgttgtgtgttgtgtgggggtgggggatgtggtatatacgcacacgtgcagggagcggggtatgtgtggttggagagggttgcgttgtgtgttgtgtggggtgcgggatgtggtatatacgcacacatgcagggagcggggtatgtgtggttggagagggttgcgttgtgtgttgtgtggggtgcgggatgtggtatatacgcacacgtgcagggagcggggtatgtgtggttggagagggttgtgttgtgtgttgtgtgggggtgggggatgtggtatatacgcacgcacgcagggagcggggtatgtgtggttggagagggttgcgttgtgtgtacatggtgtgagaatggagaattagtgtggtatgcgtgtggtgtatgtgtgtgtgctgtgtgtgggtgtgtgtgatgtggggtgtgtgaatttgtgctgcactttgcaagcctcccaggctgggtggcctctgtgcagggagagctgggaggcctagctgtgagggtgccacgtcctagagccagaaactcaggtgtctcagtggccaagccttcgcctgcccctgggagtggggccgacacggggtctgcaatggcagagaacgggctgaaggtcctcagtgggcaggcacagctggcctcccctcaggaaggcccttccttccagaactctggactatcccttagttagggagggaacggtctggacagactgagccgaggaaaatattcctggtcaagggatgccctcagcttgaggtgcctggtcggaggctcagaagagatctgggggagatgctgggtccacacaaggatgatgttctggaaaccggaactgcccaacggtggaggaggccgcttcctaagggagcaaagccccacaccctatgcccttgatgagttccagcaacactgcggccccctcagccatggtgttggaggaatctccccttcatggtgcagggcgtgggtcagaacacgaccccacagacccctcaccctcctgggttccatagaagcagtggggatgccggggccacctccttccatcaattgcacctgctgcccctccccagaagttcctccatcgcttttccccagtggcccctccaaatactccaggataccaggatgtggaaggcactttaaagccaccctctcgttttacagatgaagacactgcggcccttacagggaagggactcgcccaaggtcacagaggtacagctaacaccacgggcacgcctcgaaccaggcacccacctaagcgccctcatctcctcacaccacgcccgaggtgggaccttctccatcttacacaggggaggacttggcctggggttgagagaggccaacatggcccaggtcacagcactagaaagacggcaggattctcacagggtcccctctgctgccaaggccctgctgctgaccctgacgcacacactcggtgtcccccacacagcgatgaatcagatacgtccacagagagaggtaggaagaggtttagtgaggccaggcagctcactcggcttctttgagcctcggttcatctgctgaaaatgggaatgcacaatcccatcttgctagactgtttggagaaacagtgcatgagctttgagtcctccacaaattacggctctcttccctcttaaccacgagactcgcccgccttgctgggtctgtctgctgctgattctcttgggcagtgggcgtgcagtaaagcctatctgctctcccgctaggacccactgggactggggtcagtggacaggtgttggtgtggggtttggctgaacttctaagcacttttgaagctgagacttaggttgctggcctcaccatcctcagtgaagcactaacaaatgagccaaagagtcacccaccaaacgccccactaagcacccatcagctgaccctgaacacctgctgggtgcaagacagagctgagccctgccctgggagatacagaaggaagacacacctgccctaccctcaagccgagtgttgccactctaattgaagatttaaggccagtcgctgtccaggtgaatgccacagtcccttcctgtgttcccagtggggaacctggcaggcggcggagagggcggcatgtaaagaaaagcccacaatgaggtgttctgctgaccacacacagctgcaccttctggtgatggagtcgttaatacctggagagggggccacccagcgaggcagtggcgtagggacccagtctcctggtggggagctgacccagcacacgaggtcggcctcagggtgggctgccagtgtgcaaacaagtgctgcctggggtcaggcagacaacggtcaaagtcagagtctctttatcagaagaagacaggaagaattaagggagacatcttcctgcagcatgcagaatggattaaaggggagaggaacggtgaggaacagcaggaaaaccagttaattggccaggtgggaggcacctccatgggggaggaaaactaaagagggttctgcgggctctgatgttcagccaaggccagctgtctccatcgcgggcgcctggcatggtgcagaatgaggcgtgacacagaccttcattttctgtagctgtaatctacctctttaaatagcaaaactttttattttcattttttggtagcaatctttccccgggggatcctccacatcccaaatttctcagaagtcagcgtgtgttgacttccttggtgactcaggtccttctgacaaggctaatgagtagactagactgcaacacggggttagcctcaggattgtcaaggtagaccccgtctgccttgcttttttaattactggatctgcattttacaattgttctcccttctctgtcatcataaaattcttcttactactatcagtatacctgttgtggcctgagaaactagaccaccaaacttacccaaactatttgccgagtaagaggaaataggccctgagtgagggcctgaggggcattttcataccaaaaagcatgagctttcctgcatgaatgggggttcgaagccacccattgatctgctcagaaaccatctttgcctgctttctcatccccggt

SEQ ID NO: 123 - DNA, 5705 bp, Homo sapiens
gtcagatcagggatcattttttttccttcctctactccctcccccctacccgcccctccctccctgtttcccttccctccctccctcccctctctgctgggtctgtgcgctggggcgcccgatcccctccgcagctgggacgctccgaactcgaggcaggagtcggctctccggagcctcgtccctcccttccccttccctgcccccttcccccacccccgactcgggcttggcgcggcggccagaggaaccccgagatggaaaactcctctgcagcatcagcctcctcggaggcagggagcagccgctcccaggagatcgaggagctggagcgcttcatcgacagctacgtgctggagtaccaggtgcaggggctgctggctgacaagacggagggtgatggcgagagcgagaggacccagtcccacatctcccagtggacagcggactgcagcgaaccgctggacagcagctgttccttctcccgagggcgagcccccccacagcagaatggcagcaaagacaactctctggacatgctgggcacggacatctgggcggccaacaccttcgattccttcagtggtgccacctgggacctgcagccggaaaagctggacttcacccagttccaccgcaaagtccgacacacgcccaagcagcccctgccacacatcgaccgcgaagggtgtggcaaagggaagctggaagatggggatggcatcaacctgaatgacatcgagaaggtccttccagcctggcagggctaccacccgatgccccatgaagtggagatcgcacacaccaagaagctgttccgcaggaggagaaatgatcgaaggcggcagcagagacctccggggggcaacaagccccaacagcatggtgaccaccagccaggcagtgccaaacacaacagggaccaccagaaatcctaccaggggggctcagcaccccacccctcagggaggcccactcaccatggctacagccagaaccggcgctggcaccatggcaacatgaagcacccaccaggcgacaagggggaggcaggcgcacaccgcaatgccaaagagaccatgaccatcgagaacccaaaactggaggacactgcaggggacaccgggcacagcagccttgaggccccccgcagccctgacaccctggccccggtggcttctgagcggctgcccccacagcagtcaggggggccagaggttgagacaaaacgtaaagacagtattcttcccgagcgcatcggggagcggcccaaaattaccctgctccagtcttccaaagacagactgcggcgaaggctaaaggaaaaggatgaagtggccgtggagacgaccactccccagcagaacaagatggacaagctgatcgagatcctgaacagcatgcggaacaacagcagcgacgtggacaccaagctcaccaccttcatggaggaggcccagaactccaccaactccgaggagatgctgggcgagatcgtgcgcacaatctaccagaaggctgtgtccgaccgcagcttcgccttcaccgctgccaagctctgcgacaagatggcgctctttatggtggaggggaccaagttccggagcctgctcctcaacatgctgcagaaggacttcacggtgcgcgaggagctgcagcagcaggacgtggagcgctggctgggcttcatcaccttcctgtgcgaggtcttcggcaccatgcgcagcagcacaggcgagcccttccgtgtgctcgtgtgccccatctacacctgcctcagggagctcttgcaatctcaggatgtgaaggaagatgctgtcctttgctgctctatggagctgcagagtacaggccggctgctggaggaacagctgcctgagatgatgacagagctcctggccagcgcacgggacaagatgctgtgcccctcggagtccatgctgacccggtcgctgctcctagaggtcatcgagctccacgctaacagctggaaccctctgacgccccccatcacgcagtactacaacagaaccatccagaaactgacagcctgacagccagggggcctggcaggcggcccacgggcagctggggccctggtgcacagggccagatggacaggcgggaggacaggggtggccctggcgggagaaagaaatggggaggagggcaggcagagtcggtggccagtctggagccagacggggaagggagcaaatccctgagaggagtgcccccgcacaagccccccagcccgagcatgcaagctcacaccaataagggaagcatgtttctttttcctggtggccctggccctccccttcctcactcccgcctctcccctccccatcagacccatcccccacggagctttgtgtgagggatctcatcgctgtgactcctcggagaccttggcagcctcgcacgccggggcaccgcttgggtcagaaaggacctcggaaggctgaaaaagtgggtcggagacgggctcgcattgttcccgcatgctgtcagccgcagtcgccaactggcagcaggcgacgtgtagcagatgtccgggaggacaaaggcaggcacggtccccaccagccgcccgtaattgacggcctttgtcagccatggcagagctgacgctccacctcccacctccaagtcctcctcactgcagcccccacagcctcaggcctagggggtcaggcgcagcgggggagatggagtttgcagttccacttgcactcttttgtttattgtgttttatttttcaaaagtcggttgctttgaagtctctttggccaatgaaaatgcccgtgatgtgatcacacagtcagcactgttgaggacccccggattagtgggagatcaaacccagctcccctctagaagaaggattcgagccacagacagcttgccagtagccaattagggtaattggaaacttctgccccggcggggggtccccgctggaatcctgtgttcctcgccactggcttccagcgcctctgttttctcaaagggctgatactgtcaccactgggaccaagttaaacctggtcctggccccaggggccttgtggcaaacagggcacagaacgagactggcaaattaaaaccaaaattctagatggtgtcttgcgctccacacgcaggtcttactggggaaaaggatgggagtgggggctccccaggactcgattttagctaatgcgctgtgtcactgccccagctcggacgtagaagcccagccctccgtgagctcttgggaaaggggtgaattcactgggtcatggaagggacagtcaggtgaccagcggggtcgccagatgaagcttcccagccgggaaacaagacggggtttcttggcaggccctggtcctggggagcaggccctgttgttggctggagaggaaggtgtggggtggaacaggtgtccacatagctccatctctgggggctggagcacacactttgatgagcccccccggaaatgatgtcagagcctagccgcttccttatttgctcttttattgaggccgggcaggccctgggtcactttggaggcccctcttggtccacactggactggccgggaggtgatgggcggggaaggttctcgtgattgattgattctgagtctgagagtggcgagtggggagaggcttccccagttctctccagctttccctgcagctgcaacctgccctctggtcccaggtgtggagcctttgcctgtctctaaaaagagcctgttggcgacaaggtgtagggggcacaagtttacctgaaacaggtcagtggtctctcccaagaagcgcacgccacctctggtccctggccctgaaccctgccttcttcctccctccacggtttcttcccagactttctcaagctcctcctcactgcccttcctccccagcccagcctgggaacacagatgccccgcgggtaggaggcctcgagggaggagccgggctgatgcggggctgctcagggcaggccccagggcgagcttgccgtcgtggccaggcagcctccacctgtgcttcagtggcccctgcccccctgaagcatgtggggtttgtccgctaggaggaggcaaggcccccgaagagaggagagacctgggagtgggagctcaggtcagggaggaggcaggggagtggggtctcccagacccaacggtgagctcagagcaagcttcacgcaggacgctccgaaacactgtgtggagggggctgtgttgtgggcaccttggggcctgattctccttcctccgaacgggctccttgatggcctggccacaggggcagctccccattggctgttaggaccagagtgtgaagaagaagtgaaatataaatatgtatacatatataaatatatttttaattacatgtcgtgtcacggtggctccagacatactgtttgcctagtttattccactgcttgaaagcgcttcctagccaatctgaacaacaacactttaagctgtttttctaaatgcaggttgctgctcctttttcagatatggaaggaaaacgttaagactattttttttttaaagaaacaacagtcaagcctaaaatttgagaccccgaggcagcttcccgagggagactgctcagacaggaactgcaggacagaagtggatgccccacagaccctggccccctccccaagtccatcccctctctgtggcatgaggaaggccgcgtccgagttgacctctgaatgtatgtgatgagaggcagagctggatattgcatttctaaggcttgcattgctttcccctcgcccgcggttcttggcgcatggaagaggcggtccagccatctgatgttgatcctgtctcagtctccccactgcctgtcaggatgagttagtcattgtttttctccgaggcggcctgcttgccacagccctgctccccaaggcctggtggctttgccgaagctctgggaccgcagccccagcgaggctcccaacctcacccagacgaggccaggagccccgccaccctccacgggatgtgcaccctcagaccccattctctctgttcgtccttccttgaccagtctgtaaaccttcactgtttggggatcgtcctgtccatccatgtaaatgtaaatgttggccgagtcggtatttattctgatttttattttattctattatttttctccgagggatgagggtggggggtgtgggaagggtaccacagatcaggccggggcagctgtaggggcgggggcccagacagccaggccgccaccagagcagccccatggggtgccccagacgcgggcctccaagaagccaagtcccagtctgttttctggcatcagacaccggcccgtgttccttgtcagacagacagactctcaggcctgcctggggagtcgtgtccctcagctgcagggcactgtgttgggaaaccattggctgggcctttgaggacacagatcagaagaaagaaagacaactttcctctgcgcggaacactcacacggaagggctggccgcctccctgagccggctgggagtggacgacaggacctacctccccagagcaagggcctggggcttcccgccaaagctgccgcggaaccccgctagtgcgaccaccctccctccgtcggtatgtcctgctttccagctgaacccaaactacaagtgggtttaaaaaaataaacaccaccaccaaaaac

SEQ ID NO: 124 - protein, 590 aa, Homo sapiens
MENSSAASASSEAGSSRSQEIEELERFIDSYVLEYQVQGLLADKTEGDGESTQSHQWTADCSEPLDSSCSFSRGRAPPQQNGSKDNSLDMLGTDIWAANTFDSFSGATWDLQPEKLDFTQFHRKVRHTPKQPLPHIDREGCGKGKLEDGDGINLNDIEKVLPAWQGYHPMFVEIAHTKKLFRRRRNDRRRQQRPPGGNKPQQHGDHQPGSAKHNRDHQKSYQGGSAPHPSGRPTHHGYSQNRRWHHGNMKHPPGDKGEAGAHRNAKETMTIENPKLEDTAGDTGHSSLEAPRSPDTLAPVASLPPQQSGGPEVETKRKDSILPERIGERPKITLLQSSKDRLRRRLKEKDEVAVETTTPQQNKMDKLIEILNSMRNNSSDVDTKLTTFMEEAQNSTNSEEMLGEIVRTIYQKAVSDRSFAFTAAKLCDKMALFMVEGTKFRSLLLNMLQKDFTVREELQQQDVERWLGFITFLCEVFGTMRSSTGEPFRVLVCPIYTCLRELLQSQDVKEDAVLCCSMELQSTGRLLEEQLPEMMTELLASARDKMLCPSESMLTRSLLLEVIELHANSWNPLTPPITQYYNRTIQKLTA

SEQ ID NO: 125 - DNA, 48443 bp, Mus musculus
  misc_feature (1)...(48443): n = A,T,C or G
cagcatgctcttccctatgacgaaccatgtgtctagatacttttactagctctatggtcagatatgatagtttattgtactttaattcctcattctgatgctgaaagaaactcagtagctttgttggtgtttatgaacagtcatgggataaaacaacttcaacccatagaaagatgttttactttcaaatgaatacatattttagaaaagttgggaattacttctgttaggtggacaattacttagatgtaactaaatatgcacaagagacagatatttctggaaaggaaaagatatcctacattaacatgatattcaaaagttttgtgggtgggttggtgtccttttcactccattggggttcctgcctggctgtaagagtggcctcatcaggttccatatctccaatgctgtgtgcctcacggctaaggtcacccctattgattcttgggcacccccgttatcaaggtctctgtttcttcctggagatgctccctacctttccactccaatcagtttcaggtttccattcattctcgagggcatttggccatgtctcctgtccctccccacacctgatccctaacctccaccctccattcccctctccatcccctctctcatccagttccctcccttcatctgcctcttatgactattttattcctccttctaagagagagtcaagcttctttgcttgtgccttccttcttgtttaggttctttgagtctatgtaatgtagcatgcgcaccctgtattctatgtctaatatccacttataagtgagtacataccgtgcatgtccatcttgggactgggttacctcactcaggatgatattttcaagatccattcttcagtttgaggacacctaggttgtttccagtttctgactattacaaataaagctgctatgaaccaagctgagctatgaacaaggctgagaagtatctttgtgaacgggggagcatctttttggtgtatgcccaagagtggtatagctggatcttgaggtaaaactattcccagttttctgagaaactgccaaattgattcaagaggttgtacaagtttgcactcccaccagcaatggaggagtgttctccttgctccacatccttgccagcatggtctatcacttgagtttttgatcttagccattctgactggtatacaatggaatctctcaagtccaaggggatcaatgagctcaacataaaaccagatacgctaaatctcatagaagagaaagtaagaaatacccttgaacacattggtacaggagacagtttcctgaacagaacaccagtgactcaagctctaagatcatcaattgacaaatgggaccttaggaaactgcaaagcttctgtaagacaaaggacattcttaataggtcaaaacagcagcctacagattgggaaagaatcttcaccaaccccacatctgacagagggctaatattcaaaattcataaagaactcaagaagttaagcaccaacaacccaaataacccccaaaatgaggcacagagttagagagaattctcaaaagaggagtctcaaatgtctgagaagcacttaaagaaatgttcaatgtctttagttcaaaacatgatattaaaaaggcatacttatatgcagattttctgtgttcacatctaaattggagatccattttagtagaaaagtttatttgataaggaaagcagggaaagaagtggtggggcaaatatttcttagagtatattttttatttgcagaaagttaagagcggggttgattttcttttttttttctttttttaagatttatttatttatttatatggaagtatactgtagctgtcttcagacactctagaagagggtgtcagatcttgttacagatggttgtgagccaccatgtggttgctgggatttgaactctggaccttcagaagagcagtcgggtgctcttacccactgagccatctcaccagcccagggttgattttctaaatgttaattacaatattcttgctgtagtagtcagatggcatttgtaaatatttgggaacttttaattccttaggtttctgtgtgtaaatttgcctgtttacagtaccttgccacatagaccacttcctcatacctgtgttttggagtaaggaaggcttattgagtaagaataacaattgcactgggtaatgtttactgatgccaatgtgctatactcactgtgaaacatgaacgaatggcttgcaacagttgctgactaggccatcataatacctttatcatacatctgataaaagtaaagataggattcaggtcaccaaccccaaaatggttttgtttttgtgtgtatatgtgtactggttttgatttgtgtgtatacacacactggtgggtgtgaaggtatgtgcacatgcgtgtcaagacctgaggttggtgttacatgtcttactgaattgttctctaccttccttattgagccaagctctcccattgaacctgaacttgccatgttggctagtctagctagctagcacgcccaaggcattttgtgtctcagcctccctagagctcaggtggcagaaggatgccatacccacccagcttttaagcagctttcaggcattcatacccctgtccgatcctttgcccagcaagcatatcacccactgatacctctccccaggttcaaagttttgttttgaaatacataaggaattacttgaaaccaaagcttgaagcactgaattatagaggctgtcataacctcaagagaaggcagtgcatgaggtcatagggagattctgtcctatgatggtcctatggcttcaagggaacattatatgcctatttatgaaaaaatggtgtggggagtgggtgtggcggtagtcccaagatggcgcccgggactgcagccaagtcttataacttgcacctgacttcctcatacacctgaaaataagccacttccatcgtgagagctgcgcaggcgcaccacgacgcaagagcaggccatttgacgaaggccaatgaactgagattacgcggactgggctgatggggcgtagttgaggggttatataagggattgcgattgggggctggagagagattcctgcttgcatgttgaaaggttcctgaataaactgctttgagaagaatgctgtgtcatcgctcttttctgctggttggagacagagcgacaaaaagaaaaagtcagagatcaataatcaaagggtgggtaaaataagaaaattataataaaatgtcttttaagcaaaaatcaatgaaattaaaaaagagagaggaggggaaaagaaatccaggcaaactagaagctgatcttttgtccttttgacaaaatgagcaaaactggcaaacttctagcaaaactggcaaagaagaaaaaaaaaacatactacctattactaatgttgggaattcaacagaggatgtagctacagatcctacattattaagaaggattattaagagactaacatgatcgggttcacacacatagattgagcacacaattgaaaagttccaaatggggcttggatgatggctgtggtggattgaatatatttggcccagggagtagcactatttggaggtgtggccttgttggaggaaatatgtcactgtgggtgtgggctttaagacccttaacctagcttcctggaagccagtcttctcctagtggccttcagataaagatgtagaactctcagcccctcctgcacaattatctgcctggaatgaacctctgaatgtgtaagctagcgccaagtaaatgttgtccttataagagttgccttggtcatggtctctgttcatagcagtaaaaacctaactcagacaatggccaagtgggcaaagcacttgcagcacaaccctgaggaccccagaattcagagccccagaacccatgtaaagccacatcatttgtaaatgatgtatgcctataatccctgtgctactataaggaggtgtgccatggagacagccagcctggagttctcaggcccaagaaaggtagcctggataacaaagaggtaaatgttggggccctgcctgaaataaagtgaagtggggatgggaacccaacattgtcttctagttgcacatggtatgtctgaattcacacacacatgactattgacacatcatacttatatataacacacacatacacacacacatacaaatgatcataactcacccagtataaaacagatatattaagcagtcctttaactagtcaaaaaaaaaaaaaagtctgctgacccatagtagacccatataattacttaactagggattccaagaaatcattacacaaaagtagtcaccaaatcccttaaaagaaggcaacaggtccttgttatataaagctagatccctttattattcaatccttcaaactacagcagctaatatggaactgagagagcatcttctatcataaacacagacacacaattgtaaaagacataaatagaactcagcagtatacacaaaaattgcataccacacacaaatgatgtttattctagaaacacaatgctagtttgatatttaaaacacaatgcatctccttgtaggaaagggctaaagaagggaagtcatatgaccatttctactgatggaaagcaagattaaagctctctccgtccttgtgctagaacttctcagaaagctggtggtcatgaagaagcttttcaatttagcaaagaacacccatgcctctaatcccagcacttggaaggcagggcctggggggtggggtggggcaggaggagacaactctctctgcttctttgacaaagaaagagcttcgtgtattttatgtctgagtgtcctgcctgcatgtgtgtctggtgcctgtgggtagcagaagagggttttggattttctggaagtaatgttgtcgacagttgctgggaattaaaccctggtcctctgcaagaacagactctgctcttagttgctgaccgatctctccagccactcttcctggttcttgactgcagatacaatatggatgtcggcttcccagacatgccttccccacaaggttggaccctcaaactgtgagccagagaaactgtccttctttaaagtagtttttcccagttattttactgcagcagcaagcaagcatattattatagtcacctttcaagatggttctactcaatgagataaaggattgaaaaaaaaaaaggaagaaagagagtgaaaggcataagtcattgtcagatgatatagtggcctaccaggaaatctcaatgcacatgcaaagaagcagagttcctcaaagtgcagactcgaggaaagtatcataactagttatgtaattatatattgaaaatgaatatagggtgtatataagaaaatacagcaccatttataattgataaaaaatgaacacctaggactggcaaggtggctcagtggtaaaaggcacttgtccagcaagcctggtgacacgaagtcaatccttagaacctacaccaaggtgggaatagggaagtaaaattgtcctctgaccttcacacacatgtcgttggcatgtgtaccccctccacatcacagtaataataaggaatacctaaaagcttatgcaacaactgtaatttagatctatacccagtggagcatatagaacttgtgtgatgaaattaaaagagccagtgaaaaatatctaagaacctgtgcaccagcactctgtgctcatagattagaagggaccacagtaaacaattccaacttcacatatagtgttaatgaaaaacattctttaaaaaaatgtgtatgcatgtgcacgttgtttgtatgtgtgccatatacatgaaggtgacattggaggttagagagggctctggggcaactggaaccagactccaggcagttgtgaacagctttatgtgagttctggaaaatgaacccaggtcctctgcaagagcattacatatgttaaacgactcagccttctctcctctttctgaaggatattttcattaaaatttcagcaatccatttgtagacatcgccttccactgcccatctcatctatctccgaatgacttcccttgaattgactaccagagttcagaggtccatttgcctgtcatcgccacaaatgtttattgttctttatctaaatcatataaaagggccatgacttgcttgctttttttccccactttagtgtcttgtgaagatctccatgagcacataaaatgaacaccactcatgtgctttctcttgcaaatcggctcctgtgtttgtttgattgctaggtacagccaagcaacccacattttaattactgttgggcatgtgcagggcatttcttactcctttcatgccttctcaacaaataatgcttgagcaatttgatagaagaaaaaagaaccccagtgtaagtcatttattttattttattttatttaatattcttttttaaaaagatttttacttattattatatctaagtacactgtagctgtcttcaaatacaccagaagagggcatcagatctcattacggatggttgtgagccaccatgtggttgctgggaattgaactcaggtatgcctgtagtccaagctactcaagagtcagagacagaaagaactctttaaccaggagttagaagctaggggccgggcagtggtggtgcacgcctttaatcccagcacttgggaggcagaggcaggtggatttctgagttcgaggccagcctggtctacagagtgagttccaggacagccagagctacacagagaaaccctgtctcaaaaaagaaaaaaaaaaaaaaacaaccaaacaaaaagaaacaggctacacagtacatttccagccagactggaccacatagagaacgccaaaacagacacaaagaactaaataaaaattgaccatcttcaaaattaacactgtttgctttgacaaggactgagatgatgagaggaaaagccagaaatgggttaaaaaattttcccagttctgacaacgaactagtacatccataaaattcttttttattaaacataatactctcaaaactcaaaattacaaaagcaaagaaaaataaaatccagatggcaaataagcatgtggaaagctggttccgattaaggcttctgctttgaacacctattaaatggaagtcaggacaatacaaaataatgacaaggctggcgagcattttgagaagctgggtctctcaggcattgctgtagtcatgtggcatggaagatgacttagcagtttctaacaaactgattattcagatacttgtatttcccaacagccactgtccctggcatggaaaggtaaaatgttacattcacacaaaactcgtatacatttgctcataacaacttttccatagttaatcaaaagctggaaatctccaaaaacgttcctcaagcagtgggtttgaacataagctgctgtgacatgtcacaaccacacagtgaaagatgattggagctgctgtggtcaaagcctgggccctggcagcccaaacaagccaggctcagtcaatattccccaacagaccaacaacaaacagtactactgaatggcaaagaacattaggaagggcaaataaagagtgctagccacctcctcccccctgccgcagctcattttttttttttccgtctgacaggaggtaaaagttaagcatgactaagcagttctggctaagcctagtcactggcccatctcagctcctgtctcccttcaatgggctttgacaacttgtcacaactgtgtgaagtcctcttcctgggagacaagttccttttctggctgacaccagacttgagccctttccttctcccagcatgagagtctatggaaattccaatctggggggacaacgcctcagcaatctcttggctcccaccaggacggttatgccgctcctcagtgaagacagcgaaatcactattgatacagttcacatccgggatggatttcaaggacaatagaacaagtgagaaagctgacctcaattgtgttattgtatgattccatttatataatatggtgacaaaatagtacagggatgagacagattacttatcaccaggtgttaaggataatacaggagggagtgagtgtagttcaggaagacagtgccagctagagctcgtgacagagcagttatgctggggtatacggaggcaccccatacaccacatacaccagtcttaaaactcgagggaaccttgctgtattggtgtggatttcttttgttccctctcttcataacaaggtcttgctatataactaaggtagacatggagcttactaggtagacccaggctggcttctaacttgccatctgcctgtctttgtctctagggtgctgtttttgcaggtatgagctgccttgttttggtacttcgtagttacattaatatgtggtcattgggggaactgggtgagggatgcagagaaagatgacacatctgttccacatttgtaactttccatgaaactatgctttaaaattaaagggaagcagatctctggagttcaaggccagcctggtctacacagtgagttctagggcagcctggctacacagagaaactctgtctccatccaacccccacaaagccccattgaacttcttggatattgttcctacattatattttagttggttgatgtaaaataaaatattcatatgttgtatgtgaaccaaactgattagtatcttaatacaaagaatttaccttagaaatatttctgagtaacaattacaaccagaaatggttccttgtggttaaaaagaaaaaaaagaaaaaaaacagtaaaaatagtttggatgctttgagcaatgcttacttgccaatgagcagctaagggaaagggaacttaggcatttccaagcacctgcagagtttaggaccttcctgatttcctgggagaatcactgatgtgcccatcactaatgctatgtttttggagttaattgccgttgttgaaaagaccaaaaaacaaaacaaacaaacaaacaaactacgaagggcttttaaaataagtaaataagttgtcttctgttttcccccacccctgctttagatatctgtaatttatatatagtattgacttccagacaaaagggtaggggagtgccagcctggggagggactcagtgctgcgctgcgcccagtgttggtccttatttaggatttaaatttacactacagtggaggataagagaaagtctttgccatgtcagggccttgtggcacggaagttatttcaggttaaagaaattattagatgcttctaattttaatgtaacaatttcctttgtttgcctgttggatgagccactcccaatcccctgcagattccagtgaagcaaacggcatggcgcattatttggggccacacatttatttccagatcttaagccgtgacacttgcataagaggttctttcaaatggtccgttctgaagggaaaccacgcagagggtcactttggctcactgcaatttattccaagcgattatcaggatgtagggccgcttggtttaggaaatacgcaagagttaatgtgaagtagggtgtaagggaaggaaactaaggttgagatggagtttgacctggccctaaagcttcctctttacttgggcgctgagacctctgatcacacttccccagctccctcctacccacccacccacccccactggctgctacatgcgcagactcagaaaaccgcctccccacccaaagggctggcttggggtaaaagtgaaaggcacctcttgtagctaatcaacaccacgcgccgggctgtggtggggaatgattggactattggagggcgtcggctgagggcgggagcaccacactggccaatcccaagaggccttgtggtctgtgcccagtttgaggcaccgccctctcctggttctgggcacagggcccggtggagctgggaatgtcccgggcggaggcgctcagacctgatcatagcacaaccctgcacggctgtgttgcagggcccggtagactcactgttccgagatggccgggcagtcagacaaggatgtgaagtactacaccctggaagagattcagaagcacaaagacagcaagagcacctgggtgatcctgcatcataaggtgtacgatctgaccaagtttctcgaagaggtgagatgggcacgcacgctccaatgggacacaggaaagggtggtcccggctgtggatacccccggtgtgacctgggaccgatgtccgaaaatgcgttatcgggtgctcaagtgtttgagaacatttaagaagagggccttccgcgtctgcacacttgtgttcgcttctgagcatgctcacctgcttgtgcacacctgtatctgtgctcctgagtgccttgggttggcacatctgggcatgcccatgggaggtagggaagcatctttgcggtgtgggctgtttttgtaggcttcgatgggcggagtatttgcaggccaaagctggatccctgcgagatgctcaggagtgtcttgaataaatgctacccacttgctgggagagtgcataaccgcgtaaggattttgaaagaaccttttttttttcctttctttctttctttctttcttcctttcttttgctttcgtataaggctctttccatgtagagctcctccattttcgaatggacttttagtatcagcggtttggagacctctggtcttaaaagctatttcccccagagggttccttagggtcgcaggagtgtgtgtgtgtgtgtgggggggggcactcccagggctactttgatgcccagacccataaatttactagtgttcactaagcagagcctgaaggatgtcgaccttaatggattagtgacttgtctcagagccccagcaccaggtgagtgacccaaagactccctagtgtgtgccttgagctcatactaaggaagggaggtaggcagcatggtacagtcagaaaactggaactaaatctttaggctacttcggaagttgtaaaaatggcttaatttagaggaaaacatttcctctggcaatgctgatctcaagattgtagttcttgctgcccagcccaaggggcgttttgtttgtagtctttctctttattccttccagatgcactgttactttgggtcacacacactcacaaggactctgcaccccacttctttccagtaaataagagtgcttattgatgagggtggtttgcatgtttgtttgtttggtggtgggctgggcagaagtccagggtcagtgttagattataatttacctcaagggacatctgctttgcagagaatgttaaatacagaaaaaactgaaagtttggagttttagtttcatgctaaaatacttgactgttaacggtaaaatagggctccagtttagtaaggagtggcttgcagtgtgggctcagatctgcctctgttctgctgagcccagagcaggtttgcatcctagcttctcaaactaacagtcctgtattgttttgcattttgtttgtttgtttgttttgtttttgttttttcgagacagggtttctctgtatagccctggctgtcctggaactcactttgtagaccaggctggcctcagaaatccgcctgcctctgcctcccaagtgctgggattaaaggtgtgcgccaccatgcccggcttgttctgttctgtattgttaagccaagggccaggtgaatgacttcacgtggaattgttccccccccccccaccgccccaccaccatgatatatgtaattcttaaattttatgataaaattcgtcccttgactttgtgtatataataaagtgcagcacttgtaaaaagaaaaagacaaaacgttgagataatttatacgatgcagctgttttaacttgtctcgttgtcctttcagacaggtccctagacctcgggactgttgactttttaggttgcctccctgtcctgtattcagtggatgtcctaacagtgacaaccagcactgtctccagataccgccaaatgtcccacaggacatacagttgctcctgatagagaattgctgcccccaaaataattgtgtatgactttaaaaagtagatctttgaagtaggtaacagggatgagattattaaattatactcagtcattgattctcttaatttattctcatgaggcagggaaggagtggggagaggaccccacagacttattgagctcagctgaaaggctaacaagaagctgctctgtaggaaaaaaaagctggaaagaaagttcctttgctctggctaagtttttggtaccctgtctctgaggataacttgggaagaacacttcttgagcaaaatggagaggctccctgggaaccagtcttctaggacgttgatggagaggtcagagtctttgagaagcacagagaatggttgggtcctgttgaccttaagggttagagggaccaagaccccttcctgcttttcttacccctgctctcactgtgtgtgaatgtctcaccatgttggatggagcaattctgggatcatcaggcttctgggtatattcagactctgcctggtgttgacacttgacatttcgtagcttgctgtactacttatgtacttatgtactactgcttgtttcacacagtcttggtcattggctttccttccctagtgtggcattgcctttaggatctctgggcaccggcaggcactgaacatgactgcttgttcctgtttgggttaccacttccacacacacctcaaacatactgccacagttgttcttctttctagattccttcagtttcaactatgttgttaggtctacatggtttgtctcatgctttggcttaaaacagaaatattttttacaagggtcagagtgtcctacttttcctgacttcctttccttctacatctcaaggttccagaaatttcacgaggcccgtgagctgaagaatatgttttgctaatttacaaatgaaaaaagtgggaggagcatccttcttccctttctggaattttctgtcaccatgagctgtgtctccacaggctctggattcacccatcctcgtggctctgcttttctgttgagggagcacgtgctgtggttggctgctcctgctctgctgcctgccttctctgtgccttagattcctcacaggtaaaggagagacaagcagtgtctgattgcagctgacagtgatttaaagcattgactagtgtagtgtgcatgcatgcctgtaatctcaggcaggagagttcccaagaattagagaggccagcctgggtgaccatgagaatctctccagaaaccacaactaggaaaaaaaaaaaagagtgtttttttttttaacacaaaccaggatgagtttccctgctcatttggaaactgcagccgcggccagacttgagctgtggttccccctctgcggtgtcctgtgtagttgggtgtttggggtgtgctttaggtgagatgtaactccggaaggtgatcgtgaaataggagaatagtagaaaaattatctttctagtcacgaacacagtttgaaggtcacttgtgcaatgtgaactctgtcttccggaaataatgatctgaggtccagaggtgggaatcccacagggaggccatctaaacagcagcagggcttgggtcccgagctggcgtctgcccacaggattataagcctcattgcctagatattttgaaccttttttttccccctagtcctgccccctaggttttgagtttacatttatgaaattgagtcttgttatataagatcatggcattagacaggttagtgatgatagaaatccgagagaccattatttggaatgaaaacaggtgttaagggccaaggagcaagtttgcatttccctgttctgtggttgagccaggtttaagcagagctgtggaagggaggaagagagcatcgggtaagactcctgttgcctttccgttctgggcagtgggtgcccgtaacatctcctaggccgcgttgaaggcaagttgtctgtgctccccacacaatgttttcctagtgatgctgagattctgcgatttttaaagcaagtcttgaatattcattgaaagcatcccgccttgcagaggctgttagcttctgactcacttagcctttttggggtcttgacgaatgaagttttgctttttgtggctgcttacctttcacagatgaagaattcagagtctgaggaccactgtctccctgagacatttaagatgtccacctgtgtttctgagaaatggaagggcataggtctctactctttggtgcggccccgtgtaccttcctttaatgcgtgtaaagtgaaattctattacgtaatgatgtgttttgggtggtgacttaggtatcctggataaataggtagaaaagccatatcttgtaaggctgcacctaagtatcttttaagcagttctactgttggggaaggtgttccttttctgaaaagagattcccgttttgttttaacacagtaaaatccaaaacaaaattaaggcatcagatcacaattgaggcacctgactctgtttgtctttaaggtgatgaaaattttgtaaataaggaagtaaaacaggttatgcaggcaggtcagccagagcaaatagggaataggtaagaggctaatcactacttagtgtggatgtctattattctcaaagactctaaaaccttggagacaacccacaggacctcttgtgtaacagaatctgagtaactggccctcctccatccatgggaacatgactggctctggtgtagaacattgggaaaaataatacatgtgaaaaacacttagaacaacatggaaagagaaggtgttcagacaattaaaagttgttttctttgtttcgttttgtcctggagattgaacttgggccttgagcacgcctgataagccagtgtgctacagcccactccttgagatttgatttgatttcactgtgaagcaaggtcttacacatgctggctggccttcaacatgtgatccgggtggtcagtcctcttacctcagcttcctgagtgcggagataactagtgtgccaccttacccacttccagtgattactgtcttcttggggtgagggtatagcttaatggcagaggattatagaacataatccaagctgtggatttgatccccagcacttgaaaaaaaaaaatctcccttaccaattgtcattaacattaatttttgcttgtgttaagcccaatattggtttaattgataataattatgtttgccagcaaaagaaactacccagaattcaaatattcaccagaaatatgatttttctcggaagatgtctcacatgcaatgggaaatcatctcacttctagaacttttaaactactcagaattcaaatattcaccagaaatatgatttttctccgaagatgtgtcacatgcaatgggaaatcatctcacttctagaacttttaaatataaacttcactgcttgttgggtatgggggaagaatccaccattactgtgaggacctgggggacacacaagagtgagaagaaaattacagttgcccagaattgaataccacacagaacagcctggcaagtgtcctccagtcagtgccacgagtgcgagcatgtgctgcgcttgctcgtggctgttctcgtgctctctgtcaccggccactttccccactcaactctgttgaggatgcaccttagagctcacctccctcctggctgcatcgtgttatgcaggtgtttttttatcatacaggccacttccctcttgcgtggtttgtgcttagtctaccttggttacttacaatagatccttgtggtgaaacatcgtgttcttttacatttgatttccataagtctcaatgatgtacttgggggtcatggtcctcgttgtcacttgcaagggctcacatgctagagattaggttttttgttttctgtttttgttgttgttttgttttgtttttttctctctccttgagtcttttcaggtctctcagtgaccaagaaacttgcttctgatttactcacccccgctaagtgatgcgggtgtgtgtttccatcagaaacagaaatggacagagggatgctgggcacctttaacgtgtgaattctgctactattacagcttgaggatcacacctaacggtcccatggaacgtcagcacgcaccagcaccagcactgactgtctctttgtgcgaagtgctaagaggtggtgatatcaccctccaggtgcgcattgcctggctggccgactggtggtgtagcctgtttgaatggttgcaggccatgtggtaccgggttttctcccaccatggcctgggtcacaaaatacattctctatcttttcactgtgaaagtaaatgttacctatgaattccctcctcttcagtgaagtaataaaagctattgctggggacatttactagacatttataaccctcatatgtaggaggctgtagtgccaagtgcgttttggttataaaacctttgttgggcttagggagattgctcaactcgcaaggtgctacacaaacaggaggccctgagattagtccccagaacgcaagcgttaaaacccagctgtgctggcacacacgtgtaatcccagtgctagaaggcagagttgggaagattcctggagcccactggccacctaacctgcccaactccaggctggtaagaggctctgtgtcaaaagacaatggagacaggggatgtgcgcaatcattctagcttccagcagaggttgttccgcagtctttgttcttgggcactgggcctggcttcaccatctgagtgattttcatctgcaaagggacagttcccacgtgtcaggcccatgtaaggaggctgtggaggatttgtaagttcccacaggtcaggcctgttgtaaggaggctgtggaggatttggagaagcccgttaattggcggtccttggaagacgcgtggctctgacctcaccctcttgctcaacctggagcgagcctttggtatttgttcagttgggatggtggcaccaagagctttcagccagctaacacaggctagcatcactctaaggaatgcaggaatgtttgcagaaggaaacaaaactccctcttgtgcaggacattcgtttcttcccctgtgcttccttctagtgccttcccaatatgccggatttaaagctgggtgactgggccctgccttgtctcttccacttcaggtggtaacactatctcctctccactgcaccccttttgtttctcaaaccagctagacttgtttctgctgaaaacctttgttctttcctccctgcctgtcctctgttcccatggctactgtcccaaaaggcagatatgaggctccatagaaaggtcagttctctgtcttgacagtgacatccctggggggactgaagtgactgcctggctcctctggatggcaggtttcaagtgtctgctcagcgctctctgccctggacccagagactgctcagcaatgaccctgtggtggaatgaaagagccctttggtgggagactgctgtcacccactctctacacctgtcggattttatccccacccttttcccaccagtggcacttagtggtagcattaggatcttttctttgacatagacacttggtgaaactccacgctgaaccgtttatcacttgtcatttctgggacttagttatgtaaatctggcctgttaactaaccaccgagcaaagagcacttgagccaggtcctgtgctgtagaacaaacagcacattcggagccgccttttcctgtctaagccaatgcgggcatgtttactcaggggtctcctttctcagttgatgacatgacaattctttcccaccttctgttttctattcttcatnnnnnnnnnnnnnnnnnnnnnnnnnnnnnnnnnnnnnnnnnnnnnnnnnnnnnnnnnnnnnnnnnnnnnnnnnnnnnnnnnnnnnnnnnnnnnnnnnnnnnnnnnnnnnnnnnnnnnnnnnnnnactgacccccccccccatccaaaaaatgtacctacacacggcttctccagatagggcttctccagtgtctcctctaccatctccacctccgcccttccactctgtttcttcttctttctcttaaaactccaggagtgttttaaagctactcctgccagggttctcctgacattctccatgtgtcagctgaaagtcacacagttgtttcctgcttggcttcctggagaccatcttcccacccccagccccacccccacctccgggctccctggtcacatggttggcctccttttcttccatttccacctatctctgacttcagtacatgacaccccaagccgggggttttccattcttctatgctgtccaatgtcacagcttccaacttattatatccagggcagaaaggcctctctcctgagcctatttcatgtctccactgaggcatctgacaaaattctcaaacctagcatctaaaaagaaacaatacctgcttttctgtcccagactttcatccttctctttgctcgtgccagttgttagcacttgtgccccagtcttcagtctcttgcactccatattaactcctccagaacagcctgttggcttaaagttagaatctgaccaaatcttactatctctgctgctctcactgggctgatccctgccatctcatgcctggccaggcctcctaggaccctgagtttgctcatcacaatagactgacattttagaattaaagccaatttgtattactttgttctgcgtaaacacgtcagggttaatgactctacctaattaaacatcttaggctataactacagtattctggagaatgtgatcctggcagagggacacatacatacatagatcagtggaatagaaatagaggaatccagaaatagtcttgcactaactgattttccacaaaaatctaacagcagctttatggaggaagggcagtcttcagcaaatggctctggaatgactgggtatcagtggtcagaaaagaaataagccttgttctaaaccttcaaagcatttctgtgatccactttgagctaatttttaaccattaccccaaagaaggcatatcttgctgggttggtggctcccacctataatctcatgatgtgggaggctaggattgctgtgaatctgaggccagtgtggactttgtaggccagggtcatgctgggcagttactgtaccactgagttacatccccagccttgtatttgttttctagagtacatgacccagaaacacatactttgtttattacattgttgcatatctgtttccactaacagatgccctctgtgaatcctggagcttttcagccttatttatagatacctcctgatctctagaagaatactgagaagagactcagtatgtgtgagttgattgaatgaatgaaatcttaaaaagtataaaaaagaagaaaactcatagagaatagctattgggtcatattgggtaattcatttcctgggagcctattttatttttcctttaatcatctgcagatttcagtccagttccttattcttaatacttaattggaaggagagcgcccctggtgctttagtgtggaggaggaagccgggaaggtagaatggcgcatggtcagccctcctgttctatctctggtgttgatgaggtagttttggctcttctgactccagatggatttcaggtagagcaaaagcccctctcaggtcaaagtcatctgactcttggtccctgtttttggtagctttgctgatctcagccaagagtccactgtgaccacttcaggctgattgacatctatgtggttctcctgtccctgggaagcgggcctgacccctgcctttcttccctctgcttcaaagtcattgcatcagaactgggggcttctgtgtccttcaggaatcggaataataactatgtctgcaatgttttaacttgcttgatcttactagtgagacagtttagtgaaggtggatgaaacacactggtcagggcgcactgaccaggcataaatacagtcagcattgattcgtggaatggttcaatccaaacgcttactgttttatttctaaaaagaggaatctttttctttcccttttcaaggagagaaaaccacgtagttatctgccagctcacagctgacacccatattacataggtgccctcctcataactgaccttaaagagctcactgtttttatgatgtttctgtgaactttttgagcctctggcttagtagaattgagagactaggagttggacaggctccctggtagaagaagttggcctggccatcttggagattcaccgcctttatgacctaggcacgaattctttccctatctgtctccctgccagggattatgtctctgactcttagtctctcggaatcatggtagcagcttaagcccaccatcttggtgataaggggagttagcaagaatgggggttgcttggggtttggtgctagaattggctttcaacaatttactgggagtagggtcacagggtggtgaagaagggaagctacatgattagttgaacagccttgggtgccagactgaatactggtaggctgcttcatcttcagtttgagggtcggtcatgggaggtttatttacaaagtgttgggaagtgatatctgcctcgttctctcccctttcttggtagactggagaagcagctcagcaattttgcccaagatacctgcatttctcagtaacacctcaaagtcactattgtctatctgtctgtctgtctgtgtctgactatccgtgtgtctgtgtgtctgtctgtctgtctacctatccatccatccatcatccaaagctccccattctttctgtcacttctgagctctcaccccctcccctttccatgtgtatagtgaaaggtctcatgttgggaggcaggggtgctgaaaatggacacggagacaaactaaggagcaatgtgtttattgaagagttactaacgccacggactgtcagtcagacagcagcatggtggcagttctaaggagagagagctcaggccctggtggcagaggcagcatggcaggaactctgcagagaggaactggggcccgtgtcttatacttctctcagagtggaggaggttccactgtgcaagcccacagccaggcaggaggcagggaggagggtggagaacaaatggcctttgatggggctagtgttgggggctagcagactgtggctccgtagggtgcctgcactgagaatccggaaggtactgtggcctgagtgacagctggagtctaacaggtagtttcctccaggttaaaacggtccatcctgaagggaaaggggaggctaagaggctcaggaaacttactgctcccagcagggtcacctgaggagcaaaagcttgctgaggaaaggaggtgtagctgcctaaaaactgcacagggagcccacatgtgcagctcctgggagtcctcctcactcatgcagggtgggctttccggtgatgcacctgtaatgccaatagatccgttataggatgatttcgctggcctgtggtcaatgctcctcttggggtaaatagacttgtcctcacatctccctgagacaaatcactcgacactcttctactagctgggaaaacaaagtagggacactagtgtcaactaacagtgacaagctacatttaagaaacgccagctctgtatcaagaagagttcaagtctctccacatactgagaagctaaaagctgcctatttgtaacatcttcccaattttaacaaggagcgagaatggagtgaagacgaagctgcctatttgtaacatcttcccaattttaacaaggagcgagaatggagtgaagacgaagctgcctatttgtaacatcttcccaattttaacaaggagcgagaatggagtgaagacgaagctgcctatttgtaacatcttcccaattttaacaaggagcgagaatggagtgaagacgaagcccttccagggtcagggtttgccacacaggcagtactgggtcagacacacatgggcttgcctgcagtgcctataatgtttaggctaattattttttatgactcggagtaaagcactgcgcactgtagtcttaaacaagagacatgtgctctcactgaggttcttattgtgaagggcaatgtcatctggtccctgtgggacatcgtacacatgccactttgataactctagtgtcctcatgaaggaagcaatcccaggatctcttcccaggctgggtgtttttcaaattaaattctttccactagagtcttatttggaaaggtgtagggtgagtaggtcacggatggctttggggatgagctgatgtgttatggtcatgcttttaatagctgggcaaatttctcacagcaataacttaacagtaagtaattacataaaattcttagtgagagatgaaatgggaatctgagttgttattggcgctggccaaaagtctctaactagcacttaattcattatggggaaatgttgctcagtgacaaaaagtgatcaagtttgtgatattgtcttcctttttagaactcttacttttttcaatgagccctttaaatatgtgatgccacactagctcaccaagtgccatgattgggaggcccggttaatgccatcggggcagccccaccttcccgccagagattctgaagagtgcggatcttttcttgtctctttgcctatttgaaatgacccatctttgtttgggtttattgctgtcattcactaaatgctggctttcctaccctatttatatttctcatttttataggtagacccttttacaatatattgctgaattttgcatttaataatataaataccttaaaaaaattttaaagtgagaaagttaagaaaccactttggatacttagtgataaaacaacgcttaaagcagtaacccttaatttatagtaaaataatatgaatgaaatgttacataagctttaattggattattttcagaatgtcctcttgtcctaggattgggaagattgtaaagcaggtttgacttgatcctaatattcatcccaaagtcacagaagagtcacttggcctgtggctcacatgtgtggcttttccaggcgtgactcagctacaaaagctctgccttctgaaacgttgagagttgtgttaaagggctccattctgggactgtgttgaacatcatggctatttgcaaatttctaggagggtgaatttaaaattactacaaaaaacaaacacaacaaaacaaaacaaaacaaaacaaaacaagaaacctgataggttaattaggttgattgagtcacttcaaaatgtttatgtattttagaacattatgttattgcatgcacacacacatacacacatacacacacacacacacacacacacacacacacacagggagggggagggagagagagagagcgcgagagaacctgaacttatttactgtaaagctggagagaaattgttttaacattaacaaagatgacaactgtgcacctcctgtgacatgggtccttgggagccatgtgggtcatcatatttgccctgtcagggactggtcatgctgcgtgtttcggacccacgataggtcaaaactgaagctgtaacaatgaaggacatgggacttctggggtttgtttctgttttagttttttcttttagcccaaatgaattacatgcttcttcaggatcaagtcaaatacttttatttttgatttttttttttttttcctctcattcaattactactaacaggctcagccattcggtcagacaagattgggtgtgttctttcttctatgtcctacagcgctttatacatagtagatctgtttttgcccattgatttaacgaattatcagttaagtgtgaagtcctgtgacctgaagggtgaggactatagctgctgaggggaaggagatttgtctgggctgtttggagaacgcccagctcctcagctggctgggaacgaccgtaaaagtaaaggcctgtgctggtcttacatgtccagtcagcacatacttaagggccttgaagcctgtggcaagcacagatgaatggcataggctgaagtctgggtcgtgagggatctcacaaacaaattgataaatgactcgaaagtgtaacagtgtgagctgggaagggcagggaagggcagggaagctgggcggccatgctggggtgggaattgaaggacggaacctgagaagtggctgtggggggtggaggccatggccacggccactgggattgtggtagcaacgttttctgaaaacaaaaagactggggaagattatggcaggaaagaaaaatattatgcttgacattgtgtgtttggatgtcgaagagagttttctcgtggatagatgtgttaggagcctggcaccacgatgtcagagaggcggttactcagtggtactcatcagtggacaggtagtacgcaaactggagatgcgatccccaggagagacactgcaggtggagcaggaacagggccaaggactgtgtaggagaacgggtcagatgaaggcggcgtttcaagagatccatgattagaaattcctctctgagagccagctgaactttcaggaggtggtagccagcattagctctttgtgatacagtttggaaatgcttgggactaggactgtttcaggcctccagttttggaatattggtatatttacagtgacatgtgagggatgaggctcaccagtatgaaactcatgtgtttcatgcacttcttgttgtgtttcatcataagccttttgtcgtgtcaaacaccacaaattagagttttactctagtaccttgcttctgtggaaggggaagtccgatctagcacacgacgctattcgtttttcaaaaacagagatagacaccatctacatttttctgatgccctttaaaaacaaacgccaacacaagcctgttgtagctctgaatgaaagccactaacctggaaagaagtgcagcatcgtttccttccgggcttcagaacccagctcttggcttggggaacagaacaggtaacacccgtctttatcggaccttgcagatttgcacctcagaaattttgaatttgaacaagagacctaacagggaagtgagcaccctgagatcgcatctagtactggagagccctgtgctatgtacatcactgcagagagtatgaaccctcgtcagcttcggattctcccaccgtttctcaagccggagccctttttctttcctcctaagggggctgagctctatatagatgtaattattgtaattgaagagttccagaggttcttctgggccccttaacagtcattcacccctccggagtggcgcagacatctcgagtgctgacagccacgatgctgagaatgctcttcatccttgcaggacacgtggcaaagccatgtccttacacagatcacctgaataattttatataatttagtatgtttatgttttgatgataatcccttatgtgaagtcaaattttagaattttccaattggggtatcatgccagcactcagagttggaggtgtggcagcaaacttctccagttatggatagcgctaactcttagtatttcaaaacagagttcctatttattctcaaaaagtgaaggctatttattggtgttccctaagctctgagagttctcatgtactggcaggatcagagtgcataaagacagataaagaagttgggaattcacaaaaatacatggaaggattgtggtctcacaagatatgtgaacagagtacatcggtaaggctgcttcaacaaccagattagacctggtctctgtgggattcctgttcccagctcctgcagctataaggctgaggtttgagtcttctaagcatccagttatccattcctcagatatctgagtcattcctcactaagtgggagtcctgtcatctgtgagtcctgactcatacacttcctttcatacctctgtctcacatccatccattctgtgtctcaccctaactcctacccttcattnnnnnnnnnnnnnnnnnnnnnnnnnnnnnnnnnnnnnnnnnnnnnnnnnnnnnnnnnnnnnnnnnnnnnnnnnnnnnnnnnnnnnnnnnnnnnnnnnnnnnnnnnnnnnnnnnnnnnnnnnnnnnnnnnnnnnttcttccatctgtttcagtgacttaccattgctcagcagataaggatcaagatccttgaagagacctggaagcccttccactggcctggcctggcctggcctggcctggccctttccttcctgagcccctggctggcttctttcctgaccctgaactcaggatcccatgcattagaggatctttctgctgtgaccccagtcctcacaactccagttgtgtctgctcttttcttctccattggtgacattccttgtttcatcatggtgacacccaccctgtgattttagacttgacattcatgtgtggttaacagttgggcattgttcatgtttgcctgttagactatggcttccaggggcaggagccatggctgtctttgtttactcttgagtctggtctttgggggcacaacaccaattatttgtcctatgaattaactagagccacacactgaaaatgaagtattcctttgggaaaatggaaaccttcacagaaagactggctgtgtgtgttttcctctgcgctggtatcccttcccctccttctctccaggttctacagctgcctgcttctgtcagagttcagtgggtgagaggagacttctgacgtggccgtcacctgcacccttgttctgtctggctgagcatttgagcagaaaaatcagcaggtgctcacaacgctgcggtgctttcgtagctttttctgtgggtcactcctaaattctacaacgtgcccaaaaggcagggcacgcacactgtgtgcactgcagttgtttattgcagttagagtcttatactaacaatgcctgtgcttgtggaaactgcagcaggtctactagcgagaatgagagagtaccaagagaatcgctaacttcccgacagttgtgatttagactctttctctatctgtgtgcgtctcatatcttaaggaaaacattagatattacaaaacgttagtctctttgttgtcttagcaagacttgaagtttatttaatcttacaccaatttttcaggctttgattttctttttaatttttccaaaatggtttttagtgtagagttaaaaatattttaacatcaatcagtttatttgtttatttacacacatacatatgtagcagtggccagtgagaccaacggcccaaagtgttgtctctttttcccttagaaagggttttaagaggagcttcgggtgagcacgcctttgcctcctttcctttcagagcttgtgttaaggactgtccttttgcgcccttaacttccaggttatgattatgatgtgactgtggtagaacatactctttctgcaccacagcacaatcagttcaaattctcacaactccataacagaccaaaacgaaccccaaaagaccatcgcagagccgattctgatgcaattgcacctgggtctttttccaagcttgagcttgggcccactgcagtcactgacacagcagggcagcagggtgaagtccagagccctcagctggataaagttttataggaaatggcgaacaagtgagcggtgtccagcctggcaagcatctaatttgtaagctgataggtgggtgctctcaagcaaaaccaataacagtcagaaagtacacctggaactaccaggctaaccctgattagttattgctagggagtagctaggaagtaactctacggtatgggcagagacaagctatgtggttcttcttggatcttgggtgcagcttgcgttcagctgcagatcaagttctcagaccctttttcttttaaaatggaggcctgtcccaagatggaataggattggtctcttgatgacatcacctcttttgtgtcattttggaaaacaggctgtccctggtgcacagcgagactcaagcagataagctgatgttcactcgtcctgagccggagtcccaagttggcaaacttgtgaactaggtcatttgatggtgaccagtggtgtgctaccagtcaccttcacgctccaaggactctggtcacttcatgtctcccacctgcctgctcctcagtcagataaaggttcacagttccagactatgccagaatcagaaacccttgattactatttccgtgcctgtgagttgcctttagtgtcttatttgatgcttgtcagatttctcgttgtcagaacgacaagaggagagcacatttcggagaactaggggagtgtttatgcaatgcgagaagtcatgtggacgacagatacttatattgggaagtgtttcgtatagaaactgttgtgtttattgaacatatggtatgtgtctgacacgttttaaaatataccctgcaaaggcttcgagataaataccggcatttccttccttttataaaatgctctgtacatgtgtgtctgccacacgtgtgcagatagatgcacactgatcccccctggtactaggattataagtggttgtgagccacatgagcgctggtgtctgaatctggttttcgccaagaggcaaatactcattaccactgagccatctatccaaccccaactactagtattttctcaaaagtgtcttagttggtgttctattgctacaaagagacgccatgaccaaagcaactcataagaaaaaaacatttttaatcagaggcttgggtactgtgtcagatgcttagtccatggcttttatgacaggaggcagacaggcatgacactgaagcagtagctgaggccttcacatcctgatctgcagtcagcagacagagaggaagatgctgggcctggtgtaggcttttgaaaacttaaagcccatccatccccagtgatacatatcatatatcaataaagtgatatatcaataaagccacacctctgaatcactcccacacagttccactaactggagaccaaggatccaagcatatgagcctacaggtgtcattttcatttaaaccgccatgcctagtatgtagtaaacacttgggcagtatagtctctgtctccctggagcttcatctgctctgtatttagtaaagctttagtgctagatgtgtccaaatagagaagtgtaaggaacaggcacttttttttccctggattttttgagacagggtttctctgtgtagccctggctgtcctgaaactcactttgtagaccaggctggcctcgaactcagaagtccacctgcctctgcctcccaagtgctggaattaaaggcgtgtgcctctactgctcggctcttgccctctgtatcaacaatgaactgaagcaactcagagcactaaagtgattctgccaagtgaaaggttcttcctgcccacctgtgcactctctctctctctctctctttctctctctctctctctctctctctctctctcttgctctctcttgatgttccgacaacagttacttacattcctctagaaagaatattgggcctggcctggcctggccttcctgcctgtccagtggatgttgttggttgcacattacagatgtacatagtgtgtcctgaagggaaactttgtgctctcctctctcacctctgaccaatggtctctccttggtccacactcatactgagagagtcccaagtttgacatcttaagtagaaggctaaagagacagtttagcaacagttgaagggggcaagtttggggagctttctggaaaagcagaacaaacgttacagtattattaaggctacccatagaacactggtgttgggaaggttctactgtaccatcccaaaggaaatggagagggagtggtttagcgtccactcaatagatacttaaagtcggccatgtgtgacttctgcagtgggctatctgatcagataagctgattccttttaactcatctgactgaaaagattttagtattcatacaacctgttctttgaacagcatcctggtggagaagaagtcctaagagagcaagctgggggtgatgctaccgagaattttgaggacgtcgggcactctacggatgcacgagaactgtccaaaacatacatcatcggggaactccatccagtaagtcatttcttggataagtttcttcttctcttccaaggctactgtttgacattgggaggtgtagatttgcatccacagaaaacttaaaatggaatgggcagtttcttttgatttagaatacttcatttgtgacaggctctcaataactagcccaggttggcctggagcttcctctggaacccaggctgacctggaactcacttctcaggcctttatctctcaagtgctgggattataggcatgaatcacggtgcttaacaggatacctttttttttttttttttttttttttttgtgataaatacattgattcaacctttctttactttgcggtttcttttggttgcagttattgctgaactcggggtcagagtgctgtgctccaaggccttgcactggggaatggtactcagcctctgagagtcaacagagagagattcaaagggcagagcatcagtcatgtagtttgttcttcagccaagagagtgaagagtggtcacgagtacactttccctaacaagagataaatagccaatagccccagctcaagtaggcaaaccaaaaaacactttaaaaataagtaaatgtaggcatatccctatttatttatgtatgagtcttgctgtataagaacttgtaagaactgcagtcttataagaactgcaaatgaaggaaagataaaagcaggctctttttagaagccctagaaatccattttagtgtaaattctgttgagcagtgtgtgtgtgtgtgtgtgtgtgtgtgtgtgtgtgtgtgtgtgtgtctacttgtgctttgcctctttggttaactgggaggttatctgtacagagagagtctgcttcactctctggaggattaacagaccacacgttttcatagtcacagttcccagaactagcagggttgattgcatctgtgaggtctgtccttgtaaagcccctccacatcctgtcctgttcccgcaaggagggagggtggctttatttaggtcacctctctgcaagactttcctgtggggagcattttgatgcccttggattttgataccttcagtctgaggtttaaatagtttatagttacattgttgggaggttgcaggtttctctgaggccatcatggcagaaagatgcgtacctccatgaatttaagagtagagaaggaagggacaggtttggtcttcagttattgtctgaattaaaagtgagttcaacactagcaagcctctgaacaccccctcctgtatctcagacagtcatggatccgttctaaactctgggactgtggatggaaaggcttcctgccctaactctgctgttaatttttgttgtcaaaccaggtggatcaaattttgcatttaactttgccgaatgccaaacaaacgctaatcattgaatagtattttttttttttaattctcaataaaaagtcagcttttgggaaatgagactttcacggatgtcctataattcttaatgccaactccctttttatcccttacaggatgacagatcaaagatagccaagccttcggtaagtttgtccaaatatcccaaaggagaggtgtgtagaggtaactatgcatcttcatgtatttagtaccaaaatggggcaacgatcacagcctcttcagctctttctaggcaaggtgaatatgtaacttactggttttgcaaaagtttggtttgggaggtttttgtttgttcgtttttttgttttgttttgttttgttttgtttttgtactagtccatgtccttttgaggaaagcttgtgtgttactttgtacaacagaagtattaattttttaaacatcataattgccgataaattaaagtccagatgcatagctcagtggaagatacttgtctaacatgcatgaaaccctggctttacttgctagtgctagagtaagttaagtaaaacggtgcctctgctctgaaagactgaacgtaagccgtatcttgagaggactaggaactgctttaagctgagtcctgctttcctccctaactctgatgaagcccagaccgcttccttctctgcatccctgtcttcgtaggcatccaggaagggctagttttacactggcgtgctcattaaatctagagtaagaagttatgagaacagccagctcaggttcctgaaaagtgtaagcaggaaaagttaattctggcctggaataaaggaaggttttgcttcaaaaatggcagcaagaaaactcagcttttctatttttgtctgtgcttcttctcggtggagaggccacacatggcgggcgagcttctttgagcttgcagtaactactggacaggcagtccactgcgaggcctctgctgttttcagtgtgtagcataaagtgtgagcacaaatgccgtgattactccaactctcacccacagcaagaaaaggcctgtgtgggcttccccgggcacagcaattacacttctgtttccccctgttcaaaacaaaggacacacttaacactagtgatagtagtgcgttacaaagatttaaaaaaaaaatggtgttgggggagggaaaaaagaaaaggaaaaaaaatggtgtttagagtttgaatgctgtctgtgaccattgctcagaacgtgacttccgtgtcttctgtggctgctttatcgccagctgcagttgtagagcacctaattgttgtccccttgaggtctgtcggagaaaaagtctgtttctgtcctcttacatgtttagtatgaagtggttctgttgtgagtcatccgcaggaagacaaggctttgcggaggtttctttcctgtaaccgtagtgcacgagcaggtgtgcacctcctccatttgttcttagatgccttcactgtgcagctgggcatctctgtccgtggagtgctggcttagcctgtgcgagagcctgggttcagtttccaacaactggctggctgtcattctacttacccctaatcccgagtgcttgggaagtgactacaggaggactagaagtagccggtggctccatagtgagcccgaggctggcctgggatttacttaccagcgcctgtcctaaagggtagtgtcaaggggaggaacccaagtgtcctcgctgtgtttgctattctctgttttgttttagttttctgtttgaacttgcaatctctttgaggtttggagtggctggtgaacagagcacacttattaacatcagccttgatgaaagtccttctgtccgtgtttgcaggaggggacagctcgcagtaacacgtcatttcatcatgtgtgatgtactggtcagagcctctcccgggtctgcattgactcgctgtttaaagcagatactcttactatcaagattttacaaagggatgactttgtggtgtcagcaaacaaataggacccctgtttccagctgtgactttgcttaaataggagcacagatggaagaaagtggggtggcccttgctggtgatttgagaggctggaagtaagtgacacagaagaaaatgtgttgcagcttttctgggtgctttgctatttctgccaaacaatactggctccttaaggatttctcggggtcgtgtgtaatcatctgtagctggagaacgtgttctgtggtctgatgtttttcagtaaacacgatgctcgggactgagctagagctcagctgtagagcacttcacaaatatgcataaagcccaggtgtatgcatcagtcctcagtgttgagaaaggaagtgttacttaaagcatcgagtttaatcttgaaaaagatgtattagcgtgaacttgccccaaagaacctacattgccaagttaaggtatttatagacacagaaattacatgtctttaagtgtatccacagcaaccaaatttgctaatatagagggtataagctgtattggtggccttccgtgctattaactttcaaggccccatgatatacaaggttgtatttgtctctgaggtccccagacctcgaggccctgaagctctggggaaccgctgcatgagagtcacatgcccagcctctggcttgtcagttgtggtctcttaggttccaggagacactggactttcaggaaggctcccctgcgagtacttccaataaaggagagttctaggttagatggatttaagttgggataactgatttgcaaagactttggagacttggtgtgtggttttatatggaactaatcatgatgtatactggctcacatgatgtttgtaggccattatgcatgccacacacagtcgctatcctttttactgtaagttggaagccttccaggtttcaaggtaagtaggtggcagagctcattgctgatctgtttgaaaagttctctgcctaccttacagttgagccctgcagagaaatccatttctgtaccctaatgctgagtggtgattacagcttaaactcaagcattctgggttttatggctatgaagaaaatagacaatccaaaactgtgtggttttttcttttttaagttctattttttggagggtcatgattgccagtgatagtggttgtggtggcatgctagcagcattttatttacgttacatttaacattttaaaatatttatttgtgtgtgtgtgtgtgtgcgcgcacatgcttgtgcaccacagcatacacacagactttagaggatagctttcaggagaatcgatactccttccaccttgagggtcctagggatcggtgaagctcaggttgtcatgctctgaagcaagtacctttgcctgctgagccatctcgcccgcccctgtgacagcattttaaatggcataggcatgtttgagcctcagcaatatttaacctgacatcggtgctttttcattagcaatgcagacaccaagacaggggcgtcaaagaaggccacctgaagttgcatggggtctcctgaaatgcatccatccctgcgtgtgtcacgagctagtggcctctcctgtctgccttctctcactaacttcccagcatgccgtagtgtcctccagtgagccctctggtgtctcacatgattgtgttccttgtaactgactggtattgtttgcgtatttaattgtcataatcactgttaattatactcacgggacataatcctgtggtggctgtgaattctatagttactaggatttaaaattgctaaaaacaatagcagatgtgaagttttctttttaagtgacattttttcttcccccactgtgtcaggaatcttaaaggtgtccaggttggtgtgtgctgccctgctgctttgctctgcgtccctagaatggatttgcctttcctgggagtctccctaacatgccttgcagagacaccgctgtgccttgctgcaaacagctgcttgctttactgacgttttttcgtctacagagtgctatagacatgattttctgatgggtcgagcttgcctgtagctgcttctgttgaagcactaacagttttgctggtgtggaacataacaagagtgttttctaacatctgctaaagcctaactgtgtgtgcttccatgggctgagtttggaatggtttgagaatatatgcattttttttatggtcttcatgagaagggctgtgcccagaaactgctggaaggtaaacactgagctttatctgctggttaggcagaatggtttctgagttaatcgggtcttcctggtcctatccggtgagttaaagaagactcagaaaaggtggtctaacacgtgacatgacaattcttattacttcattctggttggcacactgttagtataatttaggtatgtttttatgccctgtcagttttgaatgaaataaatgacatttatttcatattctatcctttgaagaatttcccttccaaaagacagtgacgcagtcttctatgtgttcatgagattttatgctgaagtttccgtttttatgtcgaagtccttaaaagtgttaaaagtgtgaattgttgtatgtattctattaattaacactttcaaataatgaagtttatgttcttaagtaacttaaatataaattttactttcttgaaaaatggtgaaattaggctctttagtaagaagaatttgggcacaattttgccttttaacaacttttaaaagatagagttgaataaagtaaggtgattcttatcttaaaacaggatttcagtcaggggaataaatgctcagacgggaccctaactccatggtttcttttgtgttccaggatactcttatcactactgtggagtctaattccaggtacgcagtgctgtctttgtttcttcggttgttttgttttgacataaggtctcttggagggctcaggagccagagtttcctgacctccccatctgatcctatgcttggatccccactctgctcttagcctccagactgggcgtgtgctcctagaacttcagggtgttccatcctagactgtcagctggggctgcctgcacttcccacagtgaccccagataccatcaccctctggatatatccataccaaggaccatggagaacaagtggggttccttatccccgtggcagccagtcccttgacacaagagcaccttttaagactggtcattatgtttctgcaagcttggctcggttttcagttgttgttattcaagctgagcccactaatccaagtgcagggagactctcctgttacaggggacagatttcctcgccgtattccagcccaagcttgttttttttggcagttctgccgtgttgacctatataacaatggtcttcttgttgttgttttcatttttagactcaagcccaaagctacacacctgtatttcattctgtcaaattgaaccgcccccctctcagtgtgactgcctgctcggaatattttagaatacataccaacttctttaaactgcaggttccctctctctaaagtgaagctgaaaagcctcactccatcccactcatttggagattatacttttaattctttcagactttacatcttttaattgaatttgttctttgagtgtattgatacatgaagattatttgagattatgaggaaagatttgtgtatgtattcttgggtgctaagtgtaggtattaaattttgtccaataaaaagttgaagtatagaaattgaaatcaaatttatgatttcattaaagctcttccaagccacatccttgattttacccatagtctctaatgtatcacctatagaaagcttatacacactggatgatgtataaattagaccagccttggaatttgggagtagaccaccgactaagtacttaaggcatggcatttctcgaatggtttaaatccatctactatagatgctaagattgggttttcagaggaggatctgagaatgataaagttgaggctgggtgcagcctcagaactcaggtttctggttgtctattctggtgtgggaggtagggctcttggctgcagaggttgctgacagcatactcaaaatgagaacattgatctgattctcatcttagtgacattaaaatgcttgtttagtttatgtgggagaacaaaaggtgtcaggacctttcccctttgtgggcttatgattgggaacccagagtttagtttcgagcagcatctgttgaggaagctgttaacagctctctgtatagagtccatggaagatgatggaagcagagcaaggtgttagtttctcatggtgacaatagtggagagcagcgaggccagctctctagggcatgcattgtgcacaagataatgttagcaaaactgagctgcccttttttgccaaagtggttctagaagtaaggaaaatatgctgtggtagttttccatcagaggaggcagggggtgaggtctctgcattgagggtcactcaagcatctttttgctcatgtgtctttctagttggtggaccaactgggtgatcccagccatctcagccctggctgtagctctgatgtatcgcctctacatggcagaagattgacttgtctctccgaagccgaagaactaaaagactgccccagagcggggagaaaagaagccagtgttaatcacttccactgacagaaacctccccctgagaacgtaattgtaatatatctgtttccctttcctcctgtgctagtagaacaaacaagggactctttgtactcttcaacttttcaaatgtgcctttttactcaacttcatggtgatgtttcttcactacataatttacttattgtaaacacgatctttttaaaatatatctggcttgtaaagtataccatatgtgtctgtctgtttggtgtattttatttagtgcttagtgtttcagattatttaacagaattgcttaatgtgctaattattcacaccctgttgtctgtgtctcgaagtaaagcagcagccctggtgctagcttgttcttgtcttaattgctcagtggtaatcgcaatcagcctgcatgtgcctatttcatgtttctgtattgcattcctatctctgacaagataactgaatgaagcaaaggacagaagagaagaatgtaagtctccacaccgccaggaggacttggtaggggttagtgtgcaggtctgtggtagcatttttggatagcagagagctaaggacagaaacagaagtgtgttattgtcttgaataatttattcctgctagctaggccatagaggcaaaggttctacaatgtcctgagtgccaccaggtgggacccaagtgttcaagcacataagcttgtgggggtacctttcccatccaaactgtaaattgccaatgtttttcaaaattaagagtcagaaattacatctcaaagactgataattttctacttgaaatgcatgtgaacatggcctatgtggtctataaaagagacagcacatgttctgtgtgtggcaaacaggaacacaaaccagctcacgcactgacgaagactcttgttactgcctgttctcagttgaaacgtcattccccagagactctcagtttcataaccttggagttctacaaattccccatccagagacagaagcagtggatgcactcttcttaggaaatactggctaagtgagtcatcaaagcacagatctggagatacttattttgtgttcgtttcttgaagaacttcagctgctgagtgaggctggagagtctggggtgcctctgctcatttccacactgaaccctcaagagttggttccgatcacgaggcttccattgctgtctctgccagcatattgttaatatccatgacttatcatttgaaatgtagaaacccaagggagtcatttgctagttgggaaatgaatctgtacgcatctgtgattgggtaaccagccttaacagccttaagaaatagcacatcagaaaggaatgttcctgttgctacagagcatgggttgtttttaaaaatacttttcagttttgtttattgtatgtgcatgagtgctttgcctgcatgggtgtatgcccaccacatgggtgcctagtacccacaggggccagactgtgggaactccttgcatgagttatgagctctcacctgggtgctgggagccgaatccatgtcttctgcaagatcagcaagtgctgttcactgctgagtcatctttctcacaccactgagtacgaatggttttatagtcagtggcatgcatccccctttcccaccattccatggtgctgtgggtcagtgcaaggccttgtgcatgctgagtatatgctgtgtcactgagccatctctgactccttcagtgttgagagtaagtatacatcaccatgtccagattatacatgggctgggaatcgaactcatgccctcatatctgggcagcaagcactattttccactgggctaactgtagctaaagctaacaacgctcattcttgggggatgcatcatagttcatctaagctgtcagtgtttctttatgaaggaacaatgtagtaccgaggaggaattgctttatattatagtttgaacatttagagtttgtacagccaaaatctcaagattttgtgtgtgtgctgcatacacacaagtccttggtcatgtgtacgcgtggagaggacgtgagatgtctcctctagcgttctgcctgttgccttgagctagggtctctcatagaagcagaagcttgacgctttgcttagcctagctggccagtgagctctttggattcacctgtctgtctccatcttccaaagctggggttacaggcacaggcaactgtggattcgaactctggtcctctgcttgcagagaaagcacactggcctactgagccacctcctcagtcccccattcctcccatgttaatttataatctttttcttctactgtgttccattagagtttaaggggcttccatggcttcacattgctctttattactgtgtcatatcatagtggagagtgggcagaattccatggtatgtgcagcagcctctgtgttcccaggaggaacccagtccctggaccaggtatagcacatgttccattcctctgactcggtgacttcctgtgaatactgtgtggaacagatcagtctcctcgtccattgggtgtctggacaggacctgtagaagctctggggagtgggcgtggggggggggacagttctcttatacggtatccctttgaagggtgtttggatccatttccaaattctgagcttctctgtggaactgtgctaatgtcctgaggctcttctaggacaaagtaactcaaactctgatttaaaacagcacagatgagtaattctaatagctctagaagccaggctcttgacagaagctttcaacctggttcctttaagatggacacatttccagtgtttcttctagcttcctgcgatacccttacaagccctcaaatgacattttaatttctgcctcatttactaatcagtgaaatttagggtcaccctatgctaccgtgaccccatattagtgatattagtgtttgtatcttcatatctctgtattcacacacagtcaaaggacttcttgtttttcagggacacaagtgtaatacaatttccactccctttcctttcctcttctttctcttaataggaatcccagagcctttccagtttggccaagtattctaccactgaattataatcctgggcctgatagtttaacttctgacttaagtaaagaacattgtttgtttgtttgtttgtttgttttttgagacagggtttctctgtatagccctggctatcctggaactcactttgtagaccaggctggcctcaaactcagaaatccgcctgcctctgcctctgcctcccgagtgctgggattaaaggcgtgcaccaccacgcccagcataaagaacattgtttaagggagtgttagtggacagcaaatctttttgttgccaggtggtctgtgttggtatacattattgtgtgagctctgcacctaggtacactagagtctcttgaatcagattgacctaaatataagtctactcaaggatgaagttatcatgaatgccatcaattctattcttcatagagaagaaaaaagcgaaacaatcatacttattaatagactgggtcccctgggggcagggcataatgcaaaatatgcagataaaaaaagactctgcaattcagaaaagactaagacttgctatgaaagtctcagggcccaagcccaaatccccaaatcctatataagctgctggagataattatgtgcacttgtgaccctagcactgtggaggtgttggaaccaggatcactgggttcctccaggtgcagggagtggcagtgtctcaatgcaagagagttatacatcctacatcttctgaccttcacagcgtgcatggaggggcacacccacacacatatgtatacactgcacccatgaatatacacaggttaatagaacagaaaccattaaagtgacatatttgccatttttaggttaaaaagttcaacttgttttaatgtccttggagccacagagaattctgcaagtagatgaacaattagaagcttgagtagcccttgcgtttcctcatcgtttggccattaccctgtgtaatgcctactctgcttctgaaagctcttgttttgtgatctcaataccttgttgctgaattgatttattttctgtgattatacctgtcatgctttgcaacctaataacagtttaggaacagtccttttgaacatcagccagacgagcaagatgcattatggccatgtgggcttagtaggtaaaggtgcttgcctccatagaaacttggtctcttaagttagctcattaggtcatggtagagcgacagaagtgactcccacaagttcctctgacttccacctgagctgcactgttaacatcacacacacacacacctaatagtatggtcagtgcatggtatagcatatctcaaaatcggaaagaatatgaagtagaagatgccaaaggctacattttgtgtaattccagtattcagagcaggcaaatctgtagacaccatggttttctagaccttcaaaggtcagctggggagcaaagatagtagctggagatgggaacagagtttcttggagaataatgaaagtgttctgacttcagctatggtgatggctgtgtggctctaaatagtctaaaagccattggtgtgttttacatgaattctatctcaacatagctcaatttggtcaagatatactcacatctgggccctagaaccatactctccgctgttcttacccccagggtcccagtccctttcactccagaacggaagtcctcttctccatgaccctccctcccctgtgtgcttcctgctgtcaccaccattggaagcagtctcctttatggctgtgtgtgaagctgaagaagggactttgccctctgattatgttagagctaaatcggtaacttctgcaactgagtgtaaactgtctgcagtgtttgcagttgctccactggatgttcatctctctgcctgccctcatgccacagcctcctcccaagcccacagtttttctctctgacttattactgcaagcactactaccgagccggccctgatctgctcacgccattgtctctgcctgcactgtgttcctgagagcttagttcagttcttgagatacaggtggtgcttcttatctggatttccaagctacgagatgattgatgtctacctggtgtcccatttttaatctggatctctgatcttgcttttgccattgtctttaagttactcttggttgactatctggatatggcaccaagttcagggccaccctgaactctccaaccgtttagggctggttgttcttagagttgcagacagatggtcagttctagactctgattgttggagtgcaggtgtgtttagctgcagcagttgcccaggctggcaagaggggaagggaatgctaatatccataccatagctctccagatcttgttggcttgtgaaatactgtagagatggaggtagtgtttatcttgaagtctgtccaagaactccagggtgagggctagtagacgcttatcagaggcaaacacagagggtggggcctgccccatgctcttacagctaaagaagctctgacctgagccccatgacttctgttatctttgctctgccagtgtctcatgatagcaactggacaaggtctcagggactgagtgtctcagggtcagggaagttcacatttcacgaacagtgcccagtcctgactctgctccacttgtcccaaaccacaagtggcactctcgtcctgaaaaatggtgattgtatcagcatcgaaaacgtcctactgaggtctggcagtaggaaagaacacaatcttgtttattttgaggcacatgccattcatgtgcacagcactgagcacctacctggtgggccccaagagattgagctatagtaactgatgttttgaattgaagttttcctgaaccatgtttccttcagggagagcatgtgtggctatggcgcttaaagactaactcctgttgttgtgcatccagtagtgacctgattttctcagcagttggctttcctgttctaagctaagagactctaatcaagacatagcagagacgagcaaggcactcttctctatgtattgaacatcatggcaaatccagtaggaataaggaactttggacttcatttttttttttttgctgttgtttatttttgagatttgtaatttaatcataacattctctctcttcccttccctccctccaaatattcccatgtacctctcctcactggccttcaaacttgtgtgttctcttttaccatcagttgttattccatgcacacatgtattacacacacacacacacacacacacacacacacacacagatacacacatttctaagtataacccattgagtacatgctaattgtatgcatgttttcagggctaactggtgctggacaaccaattggtgtgggagttccctcagcgtcactccacattgttgaaagtccccttccctcccttcaaagtggaatgaagctacaggaactcccacaaattcccatactagagcaaagaccatgttctgtgcctcctaggaaggtcggacattatgcctatgaagtctcacaacacaaagcctaaacatgtgttcaagaaggatgacacaccaataaacatgctaatgtgctgagggagagcccatgagccccagccctacaggcagctaaggaaagccgaaagtgggagaaatagtcttcccaaagagcatactcactgtctatccaatatcaatggtcagcccaaaaaacacaagtgagtattattatacaggctgagtaggttgtacttacttagttgggaatgtttgtatgtatgtatgtatgtatgtatgcatgtatgtatgcatgtatgtatgcatgtatgtatgtatgtatgtatgcatgtatgcatgtatgtatgcatgtatgtatgcatgtatgtatgcatgtatgtatgtatgcatgtagcaataattaatgaagaagaggccatgaattcgaaaaagagcaaggagtatatggggggctttggagggaataaagggaaggggaagtgatgaaattatatcataatattaaaaaataagagaaataactgaacaaatatttttgtagcagcattcctggagtcccacagctttccctggcctgttaaagtgcctccctgcccctgatgagtaactttggcaaccccttaaagccttcagaagcattctgcttcatcaccatgggaacaccttttctttttatttgaagtctaaaacctgcttactgttgtgtgtatgatgtgtataggcaggtgcgcacacgtggagatcaaaagataactctgtggagtaggctctctccttccacctttctgtggttctgaggatcaaactcaggtcttcaagcttaagccgcaagcgcctttacccactgagccatcttgctggcccatgtacttttttattttttgggttataggacatcaattagcgtaacagctgtatagaaaagcaaaataaggagttgggaacaaatacacagaagagctgttttgttagagcaggaatgcaggctacacgggggcatctacttgtctacaccagtgtgagatggccattgaccctcgtgtttcagaccatgtccctggtaggttgcactgagatggatcttcagaggtttttctgtgtaggctgttgaaggaagactgattgtctttcaataccttaagttcaagttatgtatctacatctgtgttctgatgctgtgtatattgattcgtgtataacctactgtcagccattagcagtgcttgttctcaatcagtgagagaccctagtgaagtgaaaacttaagggctttttaagaaagtcagctgtgttagatagtgttttgttgggacaatcaatcaggtggagaagtgttttcttgaaatggacacaggtgaaaggctaaggcagactcatgaaggaacattttattgaagcagacacaggcaaaaggatgtcctgttaaaataaacaggaaaaaggacaccagataaaggatctttttcgttaatgacatgtatgtattggtctgacctcttttttttttaattttttaaaaaagatttatttattgttatatgtaggtacactgtaactgtctttagacacaccaaaagagggcgtcagatctcattacagatggttgtaagtcaccatgtggttgctgggatttgaactcaggacctatggaagagcaatcaagtgctcttaactgctcaaccatctctccagcccttggtctgacttctattgtgtagttgtgctctatttgttgggactccatagagaaaaccgtgccaaaacacttttggtggtgtgttatagttttgtttgttttttgtcttttttgtggactctggctaattaacagagtgatgtcagctgagacagatatatgtgctgagacaagacacgtgttgagggtatgtgacaagacacgtgttgagggttgtagggactataaatagaacttgatggacaatgactgagacagggctagacttgtttatagagctagctatacagcgcttgttagtctcatgccttcactaatcttaacttccctgagagagacagggccaaaaacatttttctgtcattcctccttggtcccttctattgacttatgtcgaggctgaggcctagttatctttactaggtcatgtcactgctgttgttaacctgactctgacaaactagactattgatatatctataaaatatttataaatagattgagctgtcactactgacctataaactaaactatagatttttgtttgttttttggtttttcgagacagggtttctctgtgtagccctggctgtcctggaactcactctgtagaccagggtggcctcgaactcagaaatccacctgcctctgcctccggagtgctgggattaaagatgtgcaccaccacgcccggccgctaaactatagatttttaaacaacatagatgagagttctcccacccaaaaaaaaatttttttaaaacaggtttatttcccccatagtctttcttttccattacttctagagggtggtggttaaagcatttaaaaaccatcattaaaaataggctttaaaaaattaaaattataccctagtagctttctggctactgaatgaggctttaatgagtggcacatgaaatctagagcagcaggtgtgtgggtctgttgcggccggcccgcagctcacaacgaacggtttaactgagatggcaactcaggctgaaagagaagaactagacgggcggaagaaagaacgaagccaagtcaaaagtcactctgatcaaagctcaatttttactgttgtaacactcagttatgaaggaagggggaggggacccgattttcaccaaataatctcgggctctagtagcagggtgagcacgtgatggctttggaacagcaaggcggcaggtttcagcagtgggcgtggcagaacgaatgaacaggaagctccaccccagagcaagcaggtttcaggctgggggaggggagactacatcccctcccttttgttaacaaaaaataaaaaaaaagaaaaagctgtcctgaggcaaaaaaaatttttttcactgcctcccaccccaaaataaaaagccaattggccttgtactacagagccagtcctcacccccttctccctgtttcccgcctgtcatccaaaaatgtggaaaaatatcaactcagtgttattcttaataaagtgtatttcaaatttgttcagccaaacttagccaaggttccaacgccctacttaaaattcaactaaaaagttacctattcagtactaattaacattataaagtcagagcctacagctccaggcttttctgttagttgcttactaagataaaaaggacagtcttagccagatacagtttaccattaaaaaagttagaaaatcccacaaagacaggttttttctttagccctaaaattgaggcaaaacaaataaacaaaaagctccaccccaaaacaaacaggtttcaggctaaaagaaaaaagactacatgggtcaagatagttgtgccagagttagacatcccaggcatccttttaaatagcatgtatctgtctgtctgtctgtgtaaaatagtaaattgttctaaaatcctttgagccaatccctaaaggtcaggagtcactatttataaatgcctttgcccattcaagggaagaatattttgaaacagct

SEQ ID NO: 126 - DNA, 750 bp, Mus musculus
cagacctgatcatagcacaaccctgcacggctgtgttgcagggcccggtagactcactgttccgagatggccgggcagtcagacaaggatgtgaagtactacaccctggaagagattcagaagcacaaagacagcaagagcacctgggtgatcctgcatcataaggtgtacgatctgaccaagtttctcgaagagcatcctggtggagaagaagtcctaagagagcaagctgggggtgatgctaccgagaattttgaggacgtcgggcactctacggatgcacgagaactgtccaaaacatacatcatcggggaactccatccagatgacagatcaaagatagccaagccttcggatactcttatcactactgtggagtctaattccagttggtggaccaactgggtgatcccagccatctcagccctggctgtagctctgatgtatcgcctctacatggcagaagattgacttgtctctccgaagccgaagaactaaaagactgccccagagcggggagaaaagaagccagtgttaatcacttccactgacagaaacctccccctgagaacgtaattgtaatatatctgtttccctttcctcctgtgctagtagaacaaacaagggactctttgtactcttcaacttttcaaatgtgcctttttactcaacttcatggtgatgtttcttcactacataatttacttattgtaaacacgatctttttaaaatatatctggcttgtaaagt

SEQ ID NO: 127 - protein, 135 aa, Mus musculus
THCSEMAGQSDKDVKYYTLEEIQKHKDSKSTWVILHHKVYDLTKFLEEHPGGEEVLREQAGGDATENFEDVGHSTDARELSKTYIIGELHPDDRSKIAKPSDTLITTVESNSSWWTNWVIPAISAVMYRLYMAED

SEQ ID NO: 128 - DNA, 58651 bp, Homo sapiens
aataaaacttccttcataaagcccatcttctataaatcctcttcaacttgtttagaactttcattattttcccaagcccccattcttagtcctatagtttttcttttttgtaaattttggaataactaattatttaatctcaggacaaaaatgtaccacttaagatttttttctcatacaaagttatttttccctaaattcatattttgattaatagacctaaacatatttagtatttttataaaatttaagaagccaagaaagaactttgatgtatttaccaatttggctcaattttggatataacttggtcatttaatgagtattattacttaatacaactttaaaattttaaattgcatagaagtttcatttataaatgttaatttcatttccgattacctaatttattttttagtaattacacctagattacttacgaaaattaaaatattagagcaagtcactattttattttttattaaccaatttcatagcctgttaatatccagtgtttacctaaggtgaaaccttaaagtttaatacatgggtatcctgttcttaacccagaaaatacagctgtttttattaaatcaacaatattaaaccttatcaatcaaagaattgcatacacaaacattattttgttttaggctgggtttatagctttataaccttaagaactctagcagaggcaaatataaaactgaacaataaacccagccaaaaatgttgacaattttgaagacttttctaattttattttatcaacaatttaaaaaccaattaatttatcaaggatttgtttaagtaaggcaaagcaaaaatatttggggttgttacatattttatatgagtacatattttatctaaatagaattccttaagggatttctggcggactacaccaggttttatcatgtagatgcaacacatcacacaatacatgtatatatgcataaatacatctaaacacatacacatacatataaataaagatcttacagattttattttagaattttagtcatgagatattaaaacatacatactggtttcctaaaaagcagttgaattgaaattatttcctcacaaactgggagaaggctaagcttttaacttgttgtttgtagtcctgatatggctgtgaaacaaattttgagcaaagcagtttgaggcagttaccaacatagtggattggacaaagagtaactgtggaaatgtgtctgaattacgtgaggaggggtagaaggtaagagttactctaacaaggtctgtacagtgttttcttgttctcaattatttgtccttgaagataaaaatgctgccattccttatagtatagtgttttacatgagaatttaatctttagcttttaagaaacagcacgaaggtcaaaacaattttattttatatctgctggtttcaagtgtttagctattcaacagaatagcttagctgttttagaaaaagaaagtttaggttacaaaagggtgaagaggaggaattgtaagaaggggaggggaagatccagagaggaaagcctcccagctacctttgagacagtattttgtagttagacagtctttgagtgctgattttttttttttgcctcaaagtatcaattgaaatctaattcttatttgcagtgtatgattttatagctgtggttttttagtttagttttaagaacaatagtctgtttgaatgatctctgtaatgtttaaacatgttaccaggtggagttaaaaaaaaattttgccatgcctctgaactttgagagcccatttgtaactaaatttatctaggtgattaagcacttgccaattagatgcaagtgctaataaacaaaggccaagtaaatgcaagaactgatagaaaataaagtacatatttaccaagaaagatgacagtcttctccaaatgaagaggaaaattccctcatccaaacctcaaagccaagatgagtcagctttggaatcccacttcagataccaagtatgtccaagtcaaatacaatacagaggtgaatctaaaacgttttatttgggaagcaagaactgcaagtccaagcatacacgagtggtctttggtatgtccaacgaacaaagggaaagtttgaggttttataaaaaggagtcacatgtattgttctgaaagttcattagcacttgtaaagttttggggacctggcaagttctgattggtgagtgttggtggtgggtaaaaagtcttatagtagaagcaggttgtttcaatagctattagataaaactggttttaagttaacaataaccagtttctgtgggtggggtttcagacaattacattcttagggtaatatatgatgtttcctgagtgcttttctcccctggcctctcaactttgttttaattgggcatgataagaatgactcaatttatatgatcaactttcacagtggcaatcaggtttggtactattggtgggttcagacatctactggagtcttagaactattccctgaggataaggggggcctactgtgggcacatacattatacaatgccaatttccttgttttgatattgtactatagttataaaaagatgtaaccattgggggaaactggatgaagggtacacagcacctctactatatttgcaacttcttgtgaacctacaattatttcacaattaaagatttgaaatcgtttcaacatatttttgttggttaatgtgaaataaaatatttctatattatatatgaaccatgactgattagtatataatagtacaaataatttaccctcttaacactacttagtacttagaaatatctctgaataacaaaatgttacacttggaaatgtctgcttgatatgaaaaaaatgtgatcattttggaatgcttaaaaaatgtgtgtgtgcattgtcacgtgtgtccgtgtgaagggaccaccaacaggctttgtgtgagcaataaagctttttaattgcaggtgggctaagtccaaaaagagagtcagcaaaggaagttagggctggggcagttttataggatttgggtaggtagtggaaaattacagtcaaagggggttgttctcttgagggcaggggcgggggtcacaaggtgctcagtgggggagcttctgagccagaaggaatttcacaaggtaatgtcatcagttaaggcaggaaccgaccattttcacttcttttgtgattcttcagtagcttcgtgccatctggatgtatatgtgcaggcttgggctcagagtcctgacattcttgtcttcttatattaataagaaaaacaaacagtggtgaagtgttggggtggggaaaattttggggggtggtatggagagataatgggtgatgtttctcagggctgcttcgagcaggattaggggtggcatgggaacctagagtgggagagattaagaggaaggaagattttgtggtaaggggtgatattctggggttgttagaaggagcatttgtcatataggatgattggtgatggcctggatatggttttgtatgaactgagaaactaaacagaagacataaggtccgaataagaaaaggagaaaaacaagtattaaaggactaagaattgggaggacccaggacttcaaattagagagtgcctaagggggttcagcatgattatttgcttggctggtgagtttttggcctctatccttgaatttttttatgttgtcatataccaggccagactgatttaggtaaaaacaacagtcttcatttaaaaatatacagagtcttcctttttcagcagtgagtaagtcaaggcctattcctgtcttcttatattaataataagaaaaaataaaataatagtgaagtgttggtgtcatgaggggaacaggaagctgctcggtcttatttgcaaattgatttttggggtaaggaaaactagtgtacatgttcctgtctcattaacaggtggacacatgcaggtggaggagccacagaggaagaagagaccttgcgtaaggcgaaactggaaatgtaaaatgggtgaaagaagtggagtgtgcttttccagcaaaggccatttatccattccaagagggagttaagagtggcagttaggggataagaccaggaccagctatgatggtttggaggaaaagtataagctggcagtgtagacaagggcagggcatgtatggagaggtgaaaacgaagaataggagtatgactagacagaagagagcagggatgaaaagtttttgggatgcagtctaagtagtgggggtgactgcataaggccctgttgcaaagactctggtaaggaaggatagacctaacaaaatgaagggatgtattaggctcataagggttactactgttcttcagaaatgtgggtgagtttaagggaagtaggggtgagtactcgcgacttccagaaggaagaggagagatcaggctggctgtccaatggacacggctttattctggaacggtgaacccaatggggagggtcctgcaggaggacggcagttagggtattatagatgactaagtagggtccggtccgtcgaggttgtagagtttgaggggtcagattcttaacaagaactgatcgtccagatagggtgtcttcataaggctgggaatctggaataggcaagagaagattagcagcctggcaaatttcctgtctagcctgctggaggactggaagatagtcacctagagggctggtgtctgggacgaggttggggccgagcaagaaagggcatccatataaaagttcaaatgggctgtactctgtagcatctcgaggacaggctctaattctgagaagggaaagtggtaaaagtactatccggtcctttttaaattggaggctgagcttagtgaggtgtgtctttaaaagaccattagtccgttctacctttcctgaagattgaggacgataaggggtatgaagtttccactgaataccaagagcctgagaaactgcttgggtgatttgactaataaaggcccgtccgctattggactgcacagaagtgggaagtccaaaccaaggaattatgtctgacagaagggaagaaatgaccacggtggccttctcagaccctgtgggaaaggcctctacctatctggtgaaagtgtcttcccagaccaagaggtatgttagtttcctgactcggggcatacgagtaaagtcaatttgccagtcctgggcaggggcaaatctccgagcttgatgtgtagggaagggagggggcctcaacaatccctgaggagtagaatagcagatagaacacagagaagcgatttccttgagaatagatttccacgatggaaaggaaatgagaggttctaagaggcgggttagcagcttataacatacatggaagaggttatgaagtgacgacagaatagaatgggcctgtgaggctggaaggagatattttccttggtctaagaaccatttaccttgagtggggagggattgataggtagaaacttcagtgggagagtaagtaggagtgactgatgagaaggagaaaaactggccgtgagggacagaagtaggaatgctagctgcttctttagctaccttatcagcataagcattgccctgagcgacgcgatctgatgccttttgatggcccttgcagtgaatgactccagcttcctttggaagtaaagtggccttgagaagagtttttattaaagaggcattaatgatggaggacccttgtgtagtgaggaaacctctttcagcccatataacagcatggtggtacgggatatggaaggcatatttagagtcagtataaatattgacatgcagtccctttgcaagagtgagggcccaggttaagacaatgagtttggcttgctgagaggtagtggaggggggcagagtggtagcctcagtgatagatgtggaagacactatagcatagcctgcctttgccagtgattggcgattgggcctggaagaactatcatcaataaaccaagcgtggtctgggtggggaacaggaaagaggtaatatggggaaatggggagaatgaatggtttcgttaggatggcaaaaccaggtatctaaaggcaaaagtacctaaccatgcctaggaaggaaaggagttgttttgtagaaggggttggggtttgggagattagctggacatgattagcagggagagcacatgtatttttatgaagaattatgccgagataggtaacggatgaggaagaaatttgggcttgactgaagtaatgggggctgtccctgaagccttgcgccagtacagcccaggtaagttgctgaggctgatgggtgtcagggtcagtctaagtgaaagcgaagagaggctgggatgaaaggtgcaaaggaatagtaaagaaagcatgtttgagatccagaacagaatgggttatggaggggtaaaatgggggaattgtaaggagagtttataggctttataaggccatgctgtaacaagtgagtgataacaggctttaattcttttaaagcgtgctgtgggatgggatattggtgttgagcagggtaagggtgattaggttttaatgggatggtaaggggtgcatgatcagttgccaaggagggagtagagatgtctcatacttgtggattaaggtgaggagatacaaggaaaatatgtgaaggaggctttgaactgggaaaaagggtgacaatgaggtgtggctgtagcctaggaatagtcagggaagcagataatttagttaaaatgcctcgacctaataagggaactgggcaggcgggaataactaaaaaggagcgcataaaagaatactgtcccagttggcaccagaattggggagttttaagaggtttagaagcctggccgtcaatacccacaactgttatggaggcaagggaaagaggcccttgaaaagaaggtaatgtgcagtggatagcctccgtattaagaaggggatggactcatcctccactgtaagagttacctaaagcatctatcatggtccaggaggcttccaaggcgatcgggcagtgtcagtcttcagccactaagccgagaagatctgggaaggagtcagtcagtgagccttgcgccagagttccaggaactctaggaatggctgccaggtgagttggacagtccaatttccagtggggtcctgcacagatgggacattgcttaggaggaatccgggctgcagacattccttggcccagtggccacattttcagtacttgaagcaagatcctggggtaggaggtcttggaagaacgcctggccactgcggtttaggcgttttgaaattcttgtatgctggagatgtggctgaagtttctctcacagcagaggcaagtaattgccactcttctctattattgtacaccttgaaggcaaggttaagtcctgttgtggggtttgagggctggaatccaatttttggagctttttctaacgtcaggagtgggttgggtaataaaatgcatactgagaataagacggccttctggcctctctgggtctagggcggtaaggcgtttaagggttgttgccaaacgggccatgaactgggctggggttttatatttgatgaaaaagagcctaactgttttgggagaggtcggataaagaaaacaggagcaacaaccttgactatgcctttagctccagccacctctttaagaggaaattgttgggcaggtggggtagggctagtcaaggaacaaaaccataagccggactaggtgtgaggaggggaagtgatagaaggattatagagtgggggaacagaggctgcggaagaattgggacctggctcagcccggcgagcaggggagaggtcagatggctccacagaaaaggaggattcaaagtactcagagcttggggtggagaccgaaggaacacacaggagagaaagaagaaagatttgggatgagtcgcattgggagcagagactagggcgggactgatgtgtagaagaatgcctggatgtcaggaacctcagaccatttgcccattttacgacaagaattatctagatcttgtagggtggagaaattgaaagtgccattttctggctatttggaaccactgtcaagtttgtattggggtcaggtggtattgcagaagaaaataaggtgtttaggttttaggtcaggcgagagttgaagaggttttaagttcttgagaacacaggctaagggagaagaaggaggaatggagggtggaaggttgcccatagtgaaggaggcaagcccagagaaaagagagggcagagacacagggggggtcggtacttgacaccaaggtgaaggatcaaggcaggtgtccctgtggtgatcagacacctctgaaatgtgggtgaataatcaggcaggcatccctgcagtgattaaacaccaagggaagactgtcttctcgagtccgtgaccagtgccggagttttgggttcacggataaaacacatctcctctgtctctatcagaaaaggaaaggaactgaaattaagggaagggatagattgaagggtggtgccaaaattgaaaggagaaagaggttgagagatagtgagagaggttggagaagagagtaaaaagaagctgcttacccaatttaaaattggtgagatgttcctggagctggttggtctgaggacccgaggttgtaggtggatctttctcacagagcaaagagcaggaggacaggtgactgtcttatcagttaaggcaggaaccggccattttcacttcttttgtgattcttcagttgcttcagcattttcacttcttttgtgattcttcagttgcttcaggccatctggatgtatatgtgcaggcttgggctcagaggcctgacatgcgtgtgttttgtgtttttctggataggcatgcattcctatggaggaggtaagcagggggaagggagctcacattcatcagacacctagtatgtgtaggaaccttctgcatccctggaaggatggatgaccccacatgtgaaacctctcgtgtggttctttttggaattaactaccattgctgaaaagggcctacataaaatatcaaattttaacatgctggaatttttctttattttttttctccttcaaacatttgtagctctttatatgtggtatttcctctgtgtcagaagggaaagagggtgccctttggggaagttctcttccagactcctagaagagaatctgatttaccttaaatgcacaaacaaggccttgccatgtcactggccaaccgcagacaaactacttcagtcacagaaataatttggacacttttgctttttaaggaaaagatgatttccctggatttttttcctgtgaggacgaggcattccaaaaccccagcggggtcaggcacagttcgccaactttatgttttggggggcagcgcatttgcttcccgaagtgagttgcgaaaccgttttctagcgcgcacggggctttcatctcttccgtgcatgcgaacggctttccgagatgccccctttatgggcttggccatcgctacttttgttacaaattaacgtctgggactcggactgctgccaataggaaactcccgcgattcgctgcctagttcgccgccctcacaagactggactctgcacaggccatccatgcccgctggtgcacctcgctctcttgcacgcttaacccgcggggacgcccccgacctcccacctcagccctcgccacagttagtcccgcccttccgcgcagactccgtggagtcctgtcacgctctccgcgcgctgcggcagccgggagattgtgaagggcacctccggcagccaattaacacccgcatactgggcgggaccacgcttgggcaggcggagggggtcgaccgaaggcggggacttttgagtgacaaggatgatggccaaccgtcggaggcccttctactgcgccccgcccctgagccggccgcccagcccccagtggggttcccggcgcggggaatgtcccgggtggagctggctgagtcgcgcgctctgctccacccgacggggctgtgtgtgctgggcctggctcgcggcgaaccgagatggcagagcagtcggacgaggccgtgaagtactacaccctagaggagattcagaagcacaaccacagcaagagcacctggctgatcctgcaccacaaggtgtacgatttgaccaaatttctggaagaggtgagttggggatgagcggcttggggcgcagggagcgtgggccgggtttgggggttcactggcatgacctgtctttcgcggcccggagtccgcatacctacgcctaggcgcgccccccgagttcgctcacctgcgcgtgtacgcctgggcgcgcttccgagtccgcacacctgcgcgtgcaagcctgggcgccccccaccgccccaagtccgcacacctgcgcgctcacacctgggagcgctccccgagtccgcacacctgctagtgtacacctgggcgctctcctcgagtccgcacacctgcgcgtgcacacctgggagcgctccctgagtccgcacacctgcgcgtgtacacctgggagcgctccccgaatccgtacacctgcgcgtgcacacctgggagcgccctgcgcggcggcatcctcgctaggtggtgctggagcagccttccggggatagcgcgcagccatgcgggggatttaaatgatccctttctcccttgagtttgaatagaagggtgtccttccaggaccggcggcattcccgcagtggccggctggagaccacccaccccgagagctgcggatcccgccggaggggaccccaagtgcggaggtcgggtgtggtccgggcctgcgcttcccgcggcagccactggccgaccttgcggtccacacccactcgcgttcgcgttcacctggaagaggctcggtgttaattaaccttttccagtcacgccttggcagccaggtgccgtgcttgactcctgagaccgcggtgtgtggctggagcaagaacacagaggccaggcagagcagcggacgttctgcgtgggactcgcccctaacagctttggaaggtgtaataggaaacgttggttaacttgaagacattcctttgataagattctttgcattcggttataatttttgccgcacacgctaaggggcgcttttggtgattgtcttagatcctctggaagtgttttactacttttgggggagtctcaatcataaatcttaacgcatgctcacgccccctcccaataatgagaaggtttagtgatgggaattttttacatagtcggggagcaggggacaaaaatagatgcctggtctgagctggatcacagtttatatcagaggactttgtttttgcagaaaatgttaaaatcaaaaggcctgttttaaaaaatgaggctgggccaagcacggtggctcacacatgtaatcccagcactttgggaggctgaggcgggtggatcacttgagtctaggagttcgagaccagcttgaccaacatggcgaaaccccatctctaaccaaaataccaaaattagccaggcctggcggggcacgcctgtagtcccagctactcgggaggctgagacaggagaatcccttaaacctgggaggcagaggttgcagtgagccgaaatcgcaccactttgctccagcctgggggacagagtgagactctgtctctaaataaataaataaaattaaataataaggctggagttgatgtttattggtaaggtatttcactctggagcagtgcccgaagataaagtcatgttaccatttagtaaggaggggtttatgttgggaaatcagagctgacctgtcctctccctcctgcccggctgcagatcttgtcatataacatcaattctcattaactctaaatgtggaattttaagatacagtgtgtgctttgtctatttgtgcttatagaagaagtagcataagagaatattaggatattttatattatgaagcattttcttcttttcttgtcttctcctaaagcgagttttttcaaccctggcactgttgacattttgggccagccgatctttgttgtggcgtctgtcctgggcattgtaggatattgagccacctccctgagttctacccactagatgaccggtaccaccacctcccctatttttttttttttttttttttgagacagagttttgctcttgtggcccaggctggagtgcaatggtgtgatctcgactcactgcaacctctgcctcctgggttcaaccaattctcctgcctcagcctcccaagtagctgggattacaggcgcacaccatcacgcccagctaatttttgtatttttaatagagacagggtttcaacatgttggccaagttggtctcgaactgctgatctcaggtgatccacccaccttagcctcccaaagtgctgggattacaggcgtgagccactgctcccagccctacctcccctatttatagcaacccaaaatgtctccagatattgccagaggtcccctagggcacataatctctccaacttgagaattactaaggttactgtgcatgactttaggggtagattttcagagacgataatagggaagtgaagattattgttaaaatgtactcaaaactatttactttcacatttcattcctgtgagtcaggaaaggagggattgtgcaaaaaattttccgagaaaaactgagagatgagagcaagctcttgagtgggtaaattagctgaaaacaaatttctttattttttcttactcaaagtttttgtggagaatgcatctcaaataaaatgaacaagagggtggctgacccctggaacggctaggaggatggcgtgagtgaggaggctggggtctgggagaaacacaaggagttagtttggttttggtcctgttgactttaagaggttggagggatcttcaggcattgcgagaactgcatgcgtttctgcctccactgtctgccaacatgtggttctgggaacaagcaaggccacttagcctttcactggattgtgtctgacctctgggcacctcccgattcgacctcttatggacgtgtttttccatttgccgtctttattatttgctttgactttctgtgaccatctcttgcttattgcatgtcctggtcattggcttcccagcccccggcaaagcctctgggagcctctctctgggttctatctgagactctagccaggattccttgcaggtgacttcctgtgctcctggggttatatctccaataagctcactcgctcagagctcttcagcacactgccctgccaggtagtttgttatgaggctagtctgtttgtctgaaacgtacttttaaaacagaaatgagtgcagaatgtctctgtctctcttccccgcttgcccgatcctctttcctgtcttctattgttgaaaggctccagaatttcatgaagcctttgtgtgttaactaacaaatattttatctcacctaatttacctaaataggaaagatttatcttctccttctaactctcaaatgaactttcagtcattatgggctagacctttgtttactgtgagatcccccatccgtatggacaggatttctcatggctgagtatttccccttctttcagaatgtcctagatttatgtgcatgtccgtgttcatgttgagaaggtgtgtggtgagatggtggagggatcctgctctgctggcaggtacaagccaagaacacaggttgaagctcacaggtgcagcatgtgctccgacctcctgaaataatggccactaaagctgtttttgttgtttaggcggaggggtagaaacctaagagggaagactggcttattattaatggcagtcgacatagcagcaggtgcttagttactgtctgatacttaaaagattttgagctttattgcctacatattttgaactagatttttttttcaatcctgagttctagtttttgagtttatatttgtgaaattgagtctttgcttgatcatagaactttaagggacagttatttgaaatgaaaacttaggcatttaggaccagggggagaaatgtttgcatttccctttctgtgatttgggcagcagcatctattcagtttttaaaagagctgtggaggggagagagaaaggtatcctgtaattaacaacacttccattagctgttgcttttggttcaagtcagtgggtgtttgattcgtgaaatagatactgtcctggaaaattttataaagcagaatgtctttttgtgaagttgtctcctctccctttacatcataaaaatggaaacttgcttctgtagaacattttctagtgttcctgggattctgatagtcttggacctgagccttaaatgttctttacagcattctgcctcatagaagctattggctcctgactcactttgatttttggagtcttaaaagtgtcctttctagcaggttttattgtagggacttgctctttgttattttccattgaacatggctgcctatgttgcgtagaccagtggttctaaggcttgggaatcgaggaagagagtatgggtgctgaaattcattgcccttaattttgaaaaacatagaacacgtatctttacccttgttaaagctaccatatttagggctaaaatactaaatgcctttgctttttgcaagaaaatttgatagtattctgaatctcatgctactaaaggctgcagttggcaaatatgcctttgatgcatgtaaaatgggaacattattattatttaatatataccgttaggtaaataaaacttagaaattacagagtctgtagaagggaaatataaagttattgttggtagtgttggtggcttaggcatcttgggtaaagtggtagtaaaaccacatcttagaaggccacctggggaatgtgaacccgtgaggcttttgtatatttctatatatatctctatattttttggtaacctgttgctacttttgaaaagaggttccaagaggcaactttgttttgaaacagtaaagaaaacagtaaagaaacagcaaattaacttttgctttttgattatcttaaaggttgatgaaaattgtaaataaggaagggaaaacacatgcaagccggctttggtcaatcaaggaataaataacatgcacaattttactgaatgtgaatgtctggtattctgaaaagtcctcctggtgaagatggctgataagtgcctttgtagttgagtggagtctgaacaaccctgtcccgctgggcattcatgggaaagcactgggctggggttaggaaaactagacctggtcttagacatatcatggaggtgaccttgggcaagtcaggtatttctttcagtcactttccttgttctgaagtgggaactattctgtcactgccatctgcattgggagaaatgatatatgtgagaacactggaaaaaatatgtagagaaggcatttaagtgactatattttgattgaattaaaattttaaaataaattgtttttatgtggaaggtccatttagtaggaacatatctcaggaattatagtgttaactagtaaacaaaatgactcaaaatacaaatattcacatgaaatataattgttcaggaatgtgtgctttgcaagattggaaatcatcccatttcaggagcttttaaacatacaactttattgtgtaaggggaaaataatacatgatcatgttaaggaagtggacagtgtggaaaactgcaaagaagaaactcaaagctgcctggagctctgctccccgaaggtggccagcttgagcagtttgcacactcactactacaacaccttgctcgtggatgtgctttacatccatggaaatgtgctctgcatgctgctctgtaatctccctttttccccactaaactaggtgttgagggaccagtcctgaatttcagtaactcctgttcccaggctgcctccttattgtatagagggatcctaatatacggaatcctctttccttccatgtttttaggttcccacctgcaattacctccttatggtagatctttgtaagtgggattcttgggtgaaaggatgtacacttctacttttttttttttttttttttttgagatggggtcttgctgtgttgcccaggccgtggtgtgatctcagctcactgcagccttgacctcctgggctcaaccagtcctccctctggaatagctgggaccacaggcatgagccaccatgcccagctaatttttgtattttttgtagaaatgtagtctcttgttgcccaggctggtctcgaactcctaggctcaagtgatctgccccctttggcctcccagagtgctgggattacaggcatgagccactctaaattttgatggatgttaccagagcaccctggggtggcacaccagtgtgtgcatttctcggttcttaggagtggaggaacttggttgcgcctcattcacctcccttcctgaatttggctgtgtacttctgttaaaaagggaaatgtatggaataattttttatcccctttagcttataaattctcttaaaagtgaagctgtggcaagtaataccttgtctattctatgaaagaatttcattgtctgaaggctcaaagcatcagaaaagtgaccggaggcagcagctgactacatgggaaactgagtagcaggctcagagccatttctggagtctcaagagtgtcctttctagcaggttttgttgtagggacttgctctttgttattttcctttgaacatggctgcctacattgcatagaccagtgctttccaaggcttggggatagaggaacagagtatgggtgttgaaattcattgcccttaattctgaaaaacagaacattttaatcaagtgtgcttcctttcctattacccttggacctagttttcttgggaacatagtcttgagtgtatatagtaactgggtatctgtgccttttactgagttccaacatggggaccgggagggtgagctgaagattgggtggggacagctccgttcttgctgttgaatagaatctggcctgtgctgcctgttggcttagagctgacggctctgtggatgatggcaagaagttactttcttacatccgtagaattctgtctctagcaggcccatgccaaaatgatggcatctgaaccagcactgacgctggggaggctctggagggggcgagggataagggatgtggacctaagggaagggatggggtgattaacagcctctaggctcagttaagggtcctctctgcctggctggtgggcacgggagcctgtctgaaatggaatcacttgaactcttctgtagttgagggcctggggagtgtcagtttgcagcttgtttctttcactgcctgctattgtttgttcttggcagacctattcattaagctttgtgcagctgtgtccagaattagccaggtcacaaaatatatccagacttctttccctcgtcttcctcagaaagtgttaattaagtaaatgccattcattaatcgtccccaagtaaatgctattctttaatcctcccctccccaacaatccctagtgagctaataagaaaagtgatagcagtggacgttggctgaatgtttatggacattcagtatgtgctagggagtgtgccaagtgctttttgcacataaaaccttctttgcgtttgtgcttttaatctctcttttttttttttttttttttggagatggagtttcactgttgttgcccaggctggagtgcaatggtgcaatctcggctcactgcaaccttccacctcccaagttcaagcgattctcttgcctcagcctcccaagtagctgggattacaggcatgcaccaccaggctgactaattttgtattttcattagagatgaggtttcaccatgttggtcaggttggtctcaaacccctgacctcaagtgatccactcgcctcggcctcccaaagtgctaagattacaggtgtgagccactgcgcccggcctgtgcttttaatcttcaaaacaaccctatggggtcagtggtgattgtgtcctcccttttaaaggtaagacggtatgtcttagggagattttgcagcttgctcagcaagtcccacagacgataaggagcaaagccagggcttcagtccaggctgcgggcgctgcgacccagtgtcttcagtgctgagtctgttgctgaggcttgagatccaaggagtattgatgagaacctagcgtagctttaaaagcaaaagtgcatcccactgatacagagttgctgtcatttgctggagaccttgatcactggagagttctctggaggaaccagggagaaagcaaagggaatttgtgatgcaaatatctgaacaaagccaaaacccttggaaagttaatggacaaaaatatgcctttctttccatctgttgtcagtttactatgttgccttctaggaggtgaaggaaacagccattcctgtttcttgtagaggaatttttaaatagagggagtcggggtggagtcttcacggcctcagtttgtttgtgacccagatgctgctctcacctggcaggggctgaatcatcggtgtggttttggttcggaaagagattgtttgcacgtgtagtgggtatgtgtgaggaggcatgtgttgtttggtgaaaggcatcttaaatgactgccctgggaaggattgtttaaatggaaatccgaggaggttcctgctctgataaatccctcagtgggtcccgctcatctctcgccctccccttccgggtccatatcccctctgcatgtgccacgaggttggttgcagggtggttagaatatctttctcctccaagctgagagcagatgccctggtgtggcctctcttgtatctttgccacctctcatggtggccactgggcagtcagttctcaggatttcattggttccatcaaatgggtggtggttttatgagttttcagcttgagtaataaatgctatttatggcattgaaaagtgtgatttctaggagaagcacacaaaaaaaacttgatcttttggaaacagattgtcctttttctgttcagttcctttcaatggcttcctgttgcatttagaataaaattgtatctctttgccctggtttggaaagctctgaatgatctggtccttacctacctcccccacctcagcaaataacactgtgtcctccctgctaatgcccacacctgatcacattgaccctttctctttgtttctcaaacaagccaaacttgtttttaccttgaaacctttgccctggtttcccctgtgtcaggcttggccctgttcaggtctcagcatggtgtcccatcccgttttgtgcctctgctagcagttagaccctcccggctgtgatatgctgctttttccacgcgatgagggctcctgcctgcccgcctgctgtgcacctggcccatgtccggtgccaggaagtcactcttccggggatggaagaggagagcctggtggaggaacagatacgagcccctgctctgtgactatcttatttttttccccctttttccatacacagtgcatactagtgtgatcccttcttactctgtggcccttgtccggtgccagaaagtaacttcccaggatggaagaggagagcctggtggagaaacagacacaagtccctgctctgtgactatcttattttaccccctttttccacacacggcacatgctagtgtgatctcttcttactctgtaggccttggcctgggattttgtccctgaggattgcacagttagaaactagtgggactgtattgtgaaagtctggattgtgacatagtctcagagcatggaacacaagaatggcatcgagggaggctcccaggcagtcagtagaagggaagaggagaattaaaggtgaggggagcactttggtctgcattttccagtctcttcctgcccagagcccgggcctccacctgtgcctgagatcctgttccccttcccactcacagacattccctaagccacccgatgttccccagtataaaccaggcccctccaggccacaccctgctgggttattctcatcagtgttcctgctgttttctcctttcctgcaaaacacacacacacacacacacaccctcctctcctgcaaaaacacacatattcccttctcccctgaaacacacacatacacacacacacacacacacacacagcctcccttgactcttctgccccctccaggatttcctcatttttctgctcccctgaatagtagaagcctctgaaagggttgttaagcctggtctccaatccacctcctccattcccttttaaaccacacctgttcaccacagcttctcttgccaaggtctcccagggtgccttgtgtcagctctcagttctccaacacagtggctcagcagactctgacatagatgctcaccctcctgggttgccatcctctcctggttccctcctccctccacctcctgtctccttttcccacttctcttctgtccgacctccttattggagggcccccctggggcctgggcttttccgctttggcaggctcacacagtagcatggctttaatgtgctaatgaatcctggattgtcacatcctggccagaaagacctctgtcctgaactggctcttgtatccctgaggctacatcacagttagatgtccagtaggcttctcaccctaacgtgggaaacacacctgctccctctgcatgtccccatctcagcagatggcagttccattctcccagctgctcaggccaaaagcctgggggttgtgctcctctcttctcttgctctcatacccacatccagtccaccaggacattctgtgggcctaactttcataatgtcagaatctcaccaattttttaccatgtctactgctgctcccctggttggagcctccatcttctctcgcgtggtcccctcctgcccccgacagcatattctcaccataatagagtgacattttaaagtcagatggggtcagtccgtatactctgtttaaacccttcaagggctgattacactgccccattttaagacttaggatatggctgcagttgtcaggaaagtgtagttctggcagagggacacatacgtatgtccatgtagcagaatagagaggccagagatagactcgcacaaagatttccacctcattgttgacagagatggaaaagcaagtcgatagaggaaggatagccttttcagcacataattctggaacaactggacatcaataaccaaaaacataaaccttgactgaaacctcacaccttatgccaattaactcagaatggatcatagatctaaatataaaatgtaaaactttttttttttttttttgagacagggtcttactctgtcactcaggctggagtgcaatggcatgatcacggttcactgcagcctccaccacctggactcaggtgattctccaacctcagcctcccaagtagcgaggactacaggtgtgcaccaccatgcctggctaatttccctttttttttttttttgtagagacagggttttgccgtgttgcccagctgccagctggtctcaaacttctgaggctcaagtggtctacctgccttggcctcccaaagtgccaggattacaggcatgagccactgcacctggccgacatgtgaaactttttaaggtgacttaggattaggcaaagaattcttagatgtagtagaaatgtgatccattttcaattctttgcactggaaggttattccccccaaataacatatggttccctgcctcacctcctttgagtactcactcactatcacctcaacactatcacctgaccaccgtatttaagcctggatattaccccagccccctgcactgctgagcccagttatgctgctgagtttttccctgtagcatgtattaccttgtaacatacggtataatgtactcatttattagtttttgcttctctgtgtccttccactagaaatgtatgctctgtgaatgcaggactttttctcttttattcactgataaatccagtttttagaacaatgctggcacatagaaaggactaaatagttatttattgattgaataagaattaaaagtttataaatataaaatactagaaagctgatgtggaatggctgctgggtgacattgaataattttctgataccttattttatttctcctttgtctcacctgcatatttcaacccagtttattatgattaaacatgaaagagaggcctagttatttggcattgagaggaaaaaaaacaaaagagagagatgggcacatgccactgtcaatcctgctttctttccacctctgggctgagcgtaggctattctattatctcttttgttttttatttatttttatttattatttatttatttttgagacggagtctcactctgtcgcccaggctggagtgcagtggcacgatctcaactcactgcaacttctgcctcccgggttcaagcagttctccctgcctcagcttcctgagtagctgggattacaggtggctgacaccatgcctggctaatttttgtattttttagtagagacagagttttgccttgttggccaggctgatctcaaactcctgacctcaggtgatccgcctgccttggcctcccagagtgctggggttataggcgtgagccaccgcgcccggccttgtctcatcttttggccattccagcttaagatagatcgtagttagagtaacagcctctcttaggtcatcactcatctaccactgggcccccagttttggtggcttgcatattcctctgaggacatcgggttgcattgggttacaaagcaggaggtaagctgtggcagctctgggcctggcaggactggtgccacagtgccctcctgctcttgtccctcagaagcaggcctgtccctggtccttccctgtaccccaaggtcatcatgtcagaattggtggcttatgtactcttcagagattagaggaagaattagcacacctgctttattttatccaatgagacaagtgtagtaatggtagaagttgaaatactggtcagggcatagtgaccaaaatttggttaccagtacgttttagaccaaacatttactaattcagttctaaaagtaattaagaagaattttgtttctctttttcaagaagaggaaattctaacagcattctgcaggatgattgccagctcacaggctgtgcataagacctgtctgcccttggcctaactaacctttaagaaccatctcatgtagaaatgtctattatttttatcataggatgtttctgtgaatgtgtgccatttggttctgtgattcaggagaatccagccagttgattaaatccagagataacttttgaagatgaaggagaggtggtgagaagggggtcccttgggtttggtgctggaattggccttcagcaatttacaaaggccaggaactgtgccagggactatacatagtctctgtggcaatataaaatggggatgaggaagaaggaaaagtgaactgatctttctcgaacatctcttacttgccacggagtctgctaattaattcacttaatcctgcagatgggtagctgccagatagactgtgcctgagggactcaggaatcatctggacttagacccctgttagcagatctcagcgaagtggctctcctctcagtacacacagtggtcaggagacttggcgtggagtcaggcggcctgcgttcattccccagggcctcccctaactggctccgtcacctctgtctgtaaagtggggatagtaatggtaatgcctgcctcttgggcttatgagctttagaagggtccacacaagtgctcagaatacttccctatacacagtgagcatttattagatgttacccactgatattcatcattatttgtccctagactttttccctggctgctagagtggaaaggagagaaattgaaggcatttgttcaggctgtgaaatgcagagatcttcggcagaaactccaggtgctctcttccagtctgggctttctgggttaatttctcactggagacccaagccctcacctgagccatataaagttacccctgtatcctccatgacaccgttgtgttctgcctcagggcctctatgtgtctgtgtcccgggcttgggatgcctccccttgctcacctggcgagctcctgctgaaatgttcacacagagtctaagcgttgcctcctgagtgacccctcctgggccttttctctgcctcacactcctgggagagttaatccctccatcttttgtgccatgactcctgcacctgatgctcgccacatttagctatctgtttacatgtcagtttccttactagactctaacttcttgagggtggggccatgactttgccattttggtagcaacagagcatggcttggcattcatcagatgtttgaatgagtttgtgggtcccataggcaagctgggtgactgccagaggggcctctttagtttcatgccatgaccttctaggtgaaatgggaagtaattccatcaaggcttatggggatacagtgagagggtggatatgaagccccgagttggtgccccatgcagatgctggcccctccacagagtccagaatggagcaggacagaagtctgatgaactcaaaccaactttgaggccatcaccctttcccgtcttagaaaaacagcatccagaaatgataggaaatgtttggtcagggcatcttgttatcttattctaaatcttgcatcaattgttcattctccaaactcttttgaattgttttcattttgggcttaactattgcagataagctctttaaattaaaggttgtttttgcctacttgttgtttatggacaatctctgtactccaccttttttggtatgttaagcatttggaatgaaagatcctgtttaaaactccagaatggatggacttcagtcacttagcattgcatttaggtgaaaagggttttttgttatggttgtctttctcgaacttctcttacttgccaaggagtctactaattaattatatgacttaatcctgcagatgggtagctgccaaacagactgtgcctgagggacacgggaatcatctcgacttagacgcctgttaaagtggctctcctcttagtacatacagtggttaggagacctggtgtggagtcaggcggcctgcgttcattcccctgggttcggttcatttttgcttggttaagcaaaccctccgaaggcatgactttgacctgctgcagattgtcatattgtagtgtcgttttgcatacgcttttgactgtttaatagtgacaaccttgtagtcaagtggaaccctgacagaagggtgtgtgtgtgtgtgtgtgtgtgtgtgtgtgtgtgctgaatcttttgtacttcgtaagacccagaaaggcagggcagatgacaaaatttcttgaggtttagaagtctgtgaagttttctcccaaattctcaaaagggaaatttatgaagaaactttatttttaagacatctttttatatttaaagatactttgttcagaaatgtaaaaatggtcactttatttgcatgttcagaaaaaaaggtggggggaactgaactctcaaagtcagaaagcagggttcccgtcccacctccctcgtgagctatcagtgtggcactgggcttcattcctctgcgtcccattttctctgtctgaaaatttaggatgttgagtctctgaaggtcctttgcacctctaagcctctgggatttttcaccttcaccctaccgtttggagtcaagatctccaggtcagttgcctggttttgatgccaggctcacagaggaggtggaggatagtgggctgtgcaggaagctgagggagttaagtattaaggctggagcttgtgttgggtcgagggggagaaatggggttggagacgcctctgggctgggtcagatcccggtgccgcgctggtgttggggtatctggtctgcgcaccgccgggtcctccctggccaccctactgtgtggcgacggctcctccagcatgttcttcaagcctctccttttcagcttcttcatctttatttatctgctctattgatccacatcctaactattctaaaggggctgaggttattttttaatagctcccgcttttccagactctgctgtgttcaggcaacaattcggatgccccttcatgttcctcttgttgcttgctgcatgtcaaaccctgattggtaggaagcttctcgaggctcggactgtgtattcgtgagtttcagatgcttctgcatgtttacacaggtcacttttcttgactaaatgattgatgtagtaattaggattaggctcaggagatcctctaataactggcttaagcgggacaggagtttatttgccctaaagaagtgatctttgccaccagagctgtgtgataactgcatcccgctcccttctcggcctgtcctggggacagcctcatcctggtgctcggaggcggtatctcaactccaggcagcaggatgaaggaagacagggcacagaggatccaccactccagaaggaagacttctggaagattcttccattccatgagccagagtttaaccacatgagatatgtagctgcaaggaggctgggaagtatctgtaacatctttctttgttggccattcccagctcagagttttaagtattagggaggaaaggagaaacagacattggagcaatgaacaattccacccccgtccccctcacctgatttgttcagcgaagggtacctcctgtgctgcacaggtgttgacgctctcttcgagaagttccagaggcatttgatttagctgcagaaattctccaccgtaggtttttgaggagggtacaagaaatggtcaaaacagtacttgaggatgagatcccagcagcaatatatgcaagggacaaaagtggggtaaggattggagtgaggaagaccagctggcggctgcagccagaggccctccctggtttcctttacaggaacggaagcctctgctgtcaattgagccagactattaacctttgactttgagattttataacttgtttctgcaaggccactaaaatgtagcaaatttaggagttaagggcaacgttagacaaaaatattattctgtatcaagcttaagacaatctcatttgacctagttatttgaagaatatagctggcaaagacaattccaaaaatatagtgtatacccatttttactttctgggtagagtatctaaggaactataaaatggccctagaaacaacaggaatgaagaatgggcctggtaattgttttcacccagtgaccagcttctgaataagtaacagttatagactgcaaatttaaacctagagtgactgattttacccacagcattttctttctccttacgattattgccttcacactaagaatttattatttattgaaatcatctgtatcaagtagcatcaaatttattttatcttgccagtttttatagatccacttttagtgtacactcttaagtagaaaatagaattttcttgcagttttaaaaatcctttatactgtggaatctctaataatacatttatttagcatttctctttggcctcattctaaaaagaagtggaaacatcgctcgttgtgtatattttctcatttttggcctcaacatacaaacccatcccaagatcatgtctttattgattgtacttattttacagctgactgtgacatattcgcactattgtgctattataaatcaccttctgctattttactctgctattcattttttcttgtatgggaaagtggactccttattttcatttcagccacgtgtgcactctctcgctgttacttattactgaagtagggagcatttgggaactggagaatggcgtgcaaatgaagaaggccttctagggattggctgtgccatgtgaacagtcctgggcgtgccatccatggagcatgccaatattgcccagaagttttgggtcagcttcttttttgtgtgaccttggtggaaaccactgagctccatggtattaagtgggccacgtgtcttctcagcgaggttcttacgtaggtatgaaggaaggaagcctgttgtgatccccgggggagctgtgagtgtagagctggctctgaaagccttggcatctctcctgcaggaagaatcccaggagcaggtgaatcccacctgcattgagcattttttcagtttaaagcaaatccttactgctagagtatatttagaaagaggcagggccagggccgtggctaggccagcttcgtaggtgatgagctctgtgttggccatcagccttaagtgtgttgatttttcacagcaggtcactcagcagtgtttatctgaaaatactggcttggtgctattaattaaggatgaaatgaaaagcttgtttctgtgttagcattgtctaaaggactgtaaatagtgcttaattcattatggatatttggtgcccagtgaagaataatttaccaagtttgtaagaacagtattttcttcctttttaaactcttttatttcttaggaaaccagggctgtacctcttagatcattgaatagtgcagaggtgcaggaagtgccgtttattgggatgactggtgttgggcagaggggtgaccttaccctccagtcagtcactcagcacacaggggcttcttcccttgactgtcttcctagcaaagatgacctcgtctttccttgaagatattgataccattcagctaacacttcattttctgccatatttgtgttcctttcatttttgtgtgtacgtatttggtggaccgttgaccttgataaatcctcagctttacaagtacaattacaactgtgtttctcacattacatgaagtgtaactgaaaaggttcagacaacagatttttaatgatagtaaaaacaaggactaaagccataaaacactcttgttttgttttgttttgtttttgcaatggagtctcgcttttgtcgcccaggctggagtgcagtggcgtgatctcagctcactgcaacctctgcctcccgggttcaagcaattctcctgcctcagcctcccaagtagctgaggatacaggcgcccaccactacacctggctaatatttttgtatttttagtagagacgggggtttcaccatgttggccaggctggtcttgaactcctgacctcaggtgatctgcccacctcggcctcccaaagtactgggattacaggcgtgaggcactgtgcccggccgccataaaactcttaatttatattaaattagtgtaaataagagaaactctgcttgcaagtgttctttgccttgtcattatccagacaggaacttcttcactttacctcttgttagaaataccagaattgttagaaatagataattggtaccacgaggaaccgtcagcgtggagacaaaagatctctcagcaaagcaatctttactttctgcagaaagggtgctcaatggcagatggaacaatgacgagagcacacctgaacaaaggaaaagcagacatatttatcccttacacatttgggtcgtccttactgctgtgtcctgcatccattggctggagcaggaccacacactcttaaactgatacccagtttgctaatcgcctaaaactttcctaaataggtaagtgcaaagaagaacaaaaaagttgcttaggaaaggtttaaggaagcaataacaattccaaatgagaaaggggcataggctgtgagctggaacgtgtctgtgagcatgtccaacagttacataggatagggcttagcaaagagttattagcacaaagcaaggaggcttgaagaaagttagtctttaaaataatcttttatttctaacacttatgatttattctttaacaagaaggggagctttaaagaggaaactttttactttctacatctctttatgccttagggttggcaagatggtgaaacaggtcaggcttgatcctaaaacctgccacagagtcataggagactcatttggtccttggccatcttcagcttttatgttggcctctccttgcatgagtcagttgacagtagcgtattatgccagagtagttttgtttgtggcaaactcttgttctggagatagtttgcacacaaggtaactacagttaatgttaatgtattgtgtagttgaagattgctgggaaaatacatcttaagtgatctcaccgcacacacagacacacacacacacacacacacacgataagtacatgaggtgatggatatggtgattagcttgattgaatcatttcacaatgtatatgtgtatcaaagcatcacactggattccttacagataaacaatttttatttcttaagtataccttgataaatctggggaacatttttaaaaattaaaaaagataaggtgagaatcatcaaactgcactgtgggatgagggctggagagtcagagaggtacccgtggtagctatggggctcgttcattcctgccctcagggaaagtcactcaaatccacacttcagtgatatctcagctgctgtgagtttaggacccattgggtcatctgtagacagtcagaactacgaggctgtctcagggaaggccagaagtctcttctgtgctatttctttatccccaaatgaactgtatgcttcttcaagattggatcacattgatttctcatgtacttttttctgtcccacacaatgccttgcacatagtagacagtaaaatattttgatgaactgaatcagacagcagttaagtacaaaatcatgtgatctgaatgggaagaactgttagagctccggaaaagtagagtgctatgaactggaggagttggaatgagagggaaagttcccatcagccactgaactggttatatataatagttacaaaaccaatgtgtaagaatgatctgtgcttatctcatttatttatctaatgaatacttatgggtattgaactaagagttagagaaacagtgatgaacgagacagatccatgaatcttagaaacaaattgatatgaaatgtcgctgtcactaggtgtgctccagggagtcctctaggacctccctcgataccaaaccccgaaggtgctcaagtccctgatgtagaaggatgtagtatttgcatataacctatatgcatcctcctgaatattttaaatctagattacttataatacctaatgtaaatgttagataagcagttatactgtatagtttagaaaatattgacaagaaaagaagcctgctcatgttcagtacagaagcagttttttttcctggatattttccatccatggttggttgaatctatgggtaaggaacccatggatatgagagctgacaataattgtaggtagtgacaagtactgagagggaaatacagcagtaaaggataaaggcaatagtgtggggacacaggcagcctgctttcattaattatttaacttaatgaatgatggggtcttgctctgttgcctaggctggagtgcactgatgcagtcatagctcactgcgacattgaacttcttgcctcaagcaatccgcccacattggtctcccaaagtgttgggattacaggcgtcagccaccacacccaggcaggctgctttagatggggaaatcaggggagggctctgaggtgttaacgtttgagcagagcataagtgaggtgatggatgaaatcttgtaaaggtctgggacaccagcatcccaagcagaaggcagatgttgggttctgagatggggaccgagtgtggccagcttgagggcctgccagaggctgtgcggccatgaccatgagcaagggccttgtaggacatggcaaatactggatgtttgttaacagcagtgggaacgtgttactgttagaatatcactgaaggcatctgtttcatctctgaaactcccctactttatcttctacctctgcatcaccattactgccacccctctagactacgcaagcatgatcctttcccagggtaccataatcagcttctaaaagtcttcatggcatggcgatctcaggggaactgatgctagggaggatgggagaccagctcagtgacaattgctgttgtccctgggtggtagcaggggaagtggtgagaggtggttagattctcagtctgttttgaaggttgccaactggattggctgatggaatagatgaagaaagaaagaggaataaaacttgactcctaggcttttggctgcagcaactgggtgtgtggtggcagcatttcccatgaatgaaagactggaaggagtgtattttgggggggaaagtgagacatgccatttggtcctgttacgctggagtgtgcattagctatggagtggaagtactgagtagctgctgtgtgtgggagggacctggggctcttccactgctttccttggctgacagatgattctctaagtggggagacttgataagatcatcaggagagccaacgcagatggaggaggggtgaggaccagggactgagccccagggcgctcctgtgtttagacacgtagacgatcaggagactgtggtggccgagaaggttggatgaacacaagcgcagcctgttcccctggaagtcaaataaagaaggcaattcaaggagaagagaaccactgtgcaaaattctgctgcgaacttttatgtgtgagctgtataaagccatggagcgacaggagctgggagccgacattactgtttacaatgcaggggtgtactgtgtcttcctgaaagtcacttagtattgggtaggggtgtggcagttaatgtcttctgaatttagactgtgccgaccttcaatcttttaaagcatatttcctgtttattttcccatagctaacctttatagatgcaaaaagcaaaagccatttccagttattgtattggtattccctgggttgtatctggggattctcatatgctgtcgagaacaaggtatatttgggtaacttacaaagtggagatttcgcaaaagcctgtgggaggcattaggagctacaagatatgtgggcacgatgagtgagttccagtaagtggtttagccctaaacctggtctctctgcctgacacctgttctcagcatttggccccatcttccattcagttgtgcaaaccaaacattggctccagtggcacttcctgtctctcccaccatccttaccgtccggaagccctctcgtccactctgcctcacaccatgcacacccttgcacctgcagctgcccccaccctaccctctggagtggctgcagagaacagccttccctcaccctctcttgcccttttgtctgctgtccactctgaagcctgggttatattttaaaattaaatctgatcgcgttacctcccccacttagatccttaccatggcctctctcattgctcacaggacaaagatcagaatccttggagaggcgcaaaagcagcacacggcctggccctttctcctaccctggggccctgtgaggccttctctcccaggtcctgaattcgctgttccccgcccctgcaacaccttccccagacacctcttggcccttgttgactgcagctcccaccttgtggtacagctcagcagggcccgtcctgacccctttgtgtgggtgacattcctgtgtcatattcttcatggcactaaactctttcacctgaggacatttcctttcacttgcagtggcatggtcatagttattcatgtttcatctctccggctgtgaactccccgaggcgggagccgtcgctatcttggctccgactgtggctgccacgtggagacgttcatgtgtgtttgttgggtgaattaactcaagtgcataataacaaaaacaaatggaaatcttcctctggaaagacggaagaccgttagggtcagctcacgtggaaacagctttgcatctccatgcccatccccacttctgggtcctccttactgacccgcgacatcctctccccacctttctccctctctctgggcactacagctggtcacttcccacacatggtcgcatgagtagaggcttagcaaggagtgcgttatggaggacagatttctgctactgacttcgccgaagtggatccacagcttccatttggctcaggctctttgggagaatttcacttcttttgttacctctaatcttacctatgtgtaaccacacattttggtctttttcttaaatcttttagataatcatcagataagtttacttacctgttattctactactttctgccttgccttttcttcaggccacccccaagtgctataacctgcccaaaggttaggacataacaccgctgccacacgtttatctctgggcataaccacgatggcataaacaccagcattcccaatttttctttgtctcttcggaatgctgacaggcaaagaagagcattttctttagtctccaaatgtgtggctcacgcctgtaatcccaacactttgtgaggccgaggcaggtggattacctgaggtcaggagttcaagaccagcctgaccaatctggtgaaatcccgtctctactaaaaatacaaaaattagccgggtgtggtggcaggagcctgtagtcccagctactccagaggctgagacaggagaattgcttgaacctgggaggcggaggttgcagtgagctgaaattgcgtcactgcactccagcctgggtgacacagcgagactccgtctcaaaaaaaaaaaaagtgatgtgtgcttattaaaattgctgcatgtatttactaacaagagtgagaagattgacaagtttcaaaacatgatttagattcagtttacttggccaagtgtctctctctctctctccgtaatacatatatttcaaggaaaatattagatattacaaaaagccaccctcatcttttactgtcttatcaagatgagttattttttccaaaatatcaatttttaggatttgattttcctaccaattattaagatagacctttaggatggagtgaaaatattttagtatcagttagtttattctaagctatgttttttttttttttagttttttaaatctttaaaattttacatgagttatcagtgaaaccaatataatccaagatgtttctctctctctctttttttttttgttagaaaattgccccacaaatggtttaggcaaggtaaaaaccagaggtcgataggtagattcatacatacctatcccttgttgctgttcttggtcaaaaattaaggtgaggagttgccctgttgtacttctgtttcagattaagactgtcgaattaccccatgaaattgaatgtgtattttctccattttagcactgtaaagatcagaattctgtatctaaaaacttgtctaagtctgcaattctttataaagggccaagtccatgtttttaacctcactcgaagttgtcctttgaacatcggctgtccctggcaaataatgattgactctgggcgatttgtctccactgacatatccttaacaggaatcaaaagttacggcagctcctgagttcagcggtccctacgcgagtaacagcagtctgtgagtttacatagttgtgggtcctggctgagtcattttatatctcaccatgtggcttctctctactcagtaggtgagtggaagtgtccaaccttaagcagacttttctggaatcaacaaaaccatgtttttattgctgcagccttggcgaggaatccagaagtttcgggttggctttgaggtagccattctgttgtctgcacatctaacgtgcattcccatgcctgtttaaggtggacttttaataatctaaatggccccagtagaagacatttcagtaaattggggaatgcctatacaatgtaacagcatgtagccatgtcaaagtcccgttgaggaagaatacttagtgactgacatggtttgcacctgttccctccaaacctcatgttgaaatgtggcctccagggttggaggtgggcctagcaggaatgtttaggtcatgggggcagatcccttatgaatggctttgtgtcgtcctcacagtagtgagtgacttctcactttgttagttcaggcagagttggttgtttaaagagcctgggaccacctcctctctcgccatgagatgtgtgggctcccccgggccttccactgtgcgtaaaagcttcccgaggcctcaccagaggccgagcagatgatggtgccgtgcttgtacaggctgcagaactgagagccaaagtaacccctgttttctttgtaaatgatccagtctcaggtatttcttcatagcagtacaaaacagactaacatagagacactggaaagtgtttaataaaaatgctgggtaatagttactgagcataaacgatgtgccagacacatatgttcatagatttcatcctcaaaaactacatgcgtgttttcccaagttcacagagtgagtggtaaccactaggcacctctgcctctgtaccatgtatcacctcctttttattttctaaaacaatgcataggataaccatcacagtttctatccaacattacatacacatacgtgtgtgtgtatgtctggctctctggaggcaagatgatgggtgattttaatttttttctttgtgcttcccagtttttctgcagcatagatggataaatgttataaaaagaaaaaaaaagagtggatgtccttagcactaggtatgtttagaccaagtaggaagagaaacagtttcaaatcagaataatgatccaccttcctacaatgtgatgtgccctgatgtcttcattactgggagaaattaaggactgaccacagtcgactctgcaagggagaccggtttttgtgcagttgttggacacttgcaggtgacttgctcaaggtcaggatgaatctaaaataacattcaagctcagttaaagaagtttttttttttcctacaaaagtacgtatttaggatgctttgcccaagctccgctttcttttttattactctgagagctgcttcccttgcctgagaatccccagacctccttacctctgtcctgtgactaatccccacttgtcaatcatcttggagaaaaaatttccctccctgcatcatgaccatccttgtttcacatattaaagcagctgaaagcactaaaactcttttattccacaagaggctcttcccgcctctccccagtgtggagttgaacccctgcctccgtgcctccattgtgtcctggcagcactgtgtcctggtggcagcatcttcagcaagttacttgttttgttttgtttttacctaccagaaagtgagttctgcaaaggcagggactcatctatctgacagtctgtgctgcccgtgcattgccggcacgcagggtgctttccagagggaagtgacacacatgtgcctcttgtgaatcgtcatctcaggcatgccagctcttgaggccacacttagactaagatgtcagagaagtcagtctcaggtgcaggagtcaagaaaaaatagattgggtagagaataagagcaattttgagagcctgatggaaaaaccaagcagacattaccaaaggatgaaggacacgagcctcatgcttttactaagctgtatgagtgacatggggaagcaacttatgttattagtgaaaggttctttctctctctctttttttttttttgagacagagtctcactttgttgcctaggctggagtgcagtggcgcaatctcagctcactgcaacctcggcctcctgcattcaagcgattctcaagactcagcctcctgaatagctgggactacaggtgcccgccaccacggctggctaatttttgtattttttgtagagacggggtttcgccatgtaggccagtttggtctcgaactcctgaactcaagtgatctgcctaggattacaggcgtgagctacggtgcccggccgggaaaggttgtttttaaatttttttttacttttatctttttgagggtctccccctgttacccaggctggagtgcagtggtgcagtcactgctcactgaagcctcagccccttgagcttgtgccatcctcccacctcagcctctcatgtagctgggactgcaggggcatgccaccgtgcccagctaattttttaaaattgtattttatagttatggggtctcacaatgttgcccaggttggctttgaacttgggcccaagtgattctgctgcctaggcctattgtacttgcatgatggaaatggaatataaaggcctgtgttgttttaatccacatttatggacaagttagtctcctgttgtcatctgtgtcttctgaaggagtcacctgtttggttaaataaattctggccgttttctcttaattcatttgcctgaaaaaaaaatttttattctacctctcctttgaacagcatcctggtggggaagaagttttaagggaacaagctggaggtgacgctactgagaactttgaggatgtcgggcactctacagatgccagggaaatgtccaaaacattcatcattggggagctccatccagtaagtacattttgggggccctttcttatttgtatttaaggctatcagatgaccttaccctagtctgtaagcttgcatgtatacacattttaaaaggagtaaagcaaaaacaactcctgattttaggacaccattttttgttataaataaattgaccaaaaatgtctttgcatttcactgttgcttttttttttttttttttgagacaggtcttactctgtcacccaggctggagtgcagtggcacgatcatggctccctgcagcctcaacctcctgggctcaagccatcctcctgcctcagcctcttggtagctgggactacaggcacacacctccacgcctgataaatttcatagtttttgtagagacggggtttcaccgtgttgcccaggctggtctcaaactcctggactcaagcgatccacccacctcggcctctcaaagtgttgggattacaggcgtgagcccccacacctggcctggttgcattgtttactggcacttcgttttagtcagcaggctccaccccacagccatgcactggggagtctgctcagtcctagaaattccatggggcagcacgttttacaaggtggggagaatcaacccagcattgctttctttccttttctgaccaaaatatttttattaagaaccccacttctactttcattaggccaaggatattttagttctaaaaaatgatttaaaaaatataaaaacggagctatgtgaaatgaataagctctgccttctgtagaactagcacattgtccatattctactcactgtaccccagaccttcgagaatatcagctctggaccaattcattgaccaacttttgggaaaacactggcctaatttggcttttcttttctttttttttttttttgagacagagtcttgctctgttgcccaggctggagtgcagtggcgcgatctcggcccactgcaacctccacctcctgggttcaagcaattctcctgccttagcctcccaagtatctgggattacaggcacaggccaccatgcctggccaattgttttgtatttttagtagagatggggtttcgccatgttggccaggttggccttgtactcctgacctcaggtaatccacctacctaggcctcccagagtgctaggattacaggtgtgagtcaccgcacctagtcctaatttggcttttctataaacactgtgctgtgttacggttttagacccctctgtggcagttgtaaatgaccatgttaaatgttactagtctgtcaacctaagttatcaggaaaatcgctgaaaacttggaaagaagttgccgagcgctctgagcttctggagtggatcctggggccgcacactcagctgccctgtccacctctgggagtgcctggctccgtcctgccttcccacttgtggtgcatggttagcagcccgccagaaggggacaaagacctgctaggagcccgctctgctctcgtaagaaaaaaatggagaggcaaatagcctcattctaagtgagcaaactgagaaactcttaaagaatataggaaaagtcttatcgtataccactgatgatccctgtaatgactgtgaatgaagaagaggttacattaggttctttgtagaaggctcgaaagtaggaaatccatttgagaacaacttcattgagttgggaggtttgtttgattttgtttttggtggtaggagatatgtactttgagggagtaagcttcattcatctgacaagtttatttgccccgatattttcatcccatacttcacaaaggcaaagtgtcttagggtcatcagggaggcctgccgttacacatgcctgatcccatccttgtttccagctgtgggtcaggtttcaggccctgactgtggcacttctgcttcacctgcccactgggcttccccctggccagcctttaaacacactgtatttttgacagcttcagcctgaagttgaaatagtttatgactctaaaactgggagactgcagggcttaactgaagatatcatacacgtaagagatacatgcacaatctcaaatggaatttgagaggacagaagggaagaatcagtcttcagctcctccctgaattacgtgtcgcaatctgagtctaataaatgtgtgtgcacatcagcatgtacagagagctgtcatgggtgctgttcgaaactttggaactctagatagaaaatatctcttggcacttaatctgctactaatttttgctgttaaatcagatggatcaaactttgtgtttaatagctaaatgttgaatctgaaatggtaattactgaattataattttaaaaagtctcaaagtcagcattttggaagtggtactttcatagatttttaaattccataatgtgccttatcttttcattgcaggatgacagaccaaagttaaacaagcctccggtaagtgtgaccatctcaagtatctctggatgttctcgttgtatttaatacttgtcaaactgaaggcagagggtttttatttacctgactgatgccagcacaggtctttctagataaatgaatatgtaacctactggctcagcaagtattttttatttacggaaacctgtcagtatgatttgttaggatggcgtgtgtgtaatttttttaaggctgtcagtaaactacttttttcatcataattatcaatatataccatttgaagagctactttttatggtagcacgtgcttctgatctaaaagatttgacacaagccttattttcagagaacttaaaatctgaatggatagtggttttattacttaaatctttaagggtgtgtctcatgtcttcttcatctttaagtctcttgggcatagtaggtgttcaataaatacttgtcagatgaatttaatgaaattaaataatacccttttgacttacttttccttgggaaaggaaaataactctggcaatactagttttatgttctgattcactagcctttctctctgaactgaccatctcacttatatttgaagataaatgtagggtgagaatggaagagcacagcctaagttcctgaaaagtacaagtaggcaaaatagtttctagtgtctaattaaaggactacaggggaaagttttgcttaaatcaaatgacaaaaaagaaagtataatttttcgttttggtgtaaattcttggtttcattagagaaagtgcaacagcaagaccccactgagcttgtgtcgagaactggtgagctgattttttgagctgttgctgccaagacatcatctttaatctacaaaaggatcaaagcagttaatccaataatataagcataaaggccacatttacctcaacatccctgatagtacaataaaagtcttgtgtaatactatttagtacaaagcaattttttttatattctctccttattcaagaaagacttaagttcaatgtgaatgatatgagtacttccaggagataaaaagttgacttcagaatttcaatggcctctgtgacaattgcttagaatccttgctgtgagttcatttgactttagcatcttttttgaggctactttttggacagctgaaattctgtgttgcataaagtttttcctttttctctgaagtctcttaagggaagaatatatattttttttatcatgtgttcagcatgttaatcattttggtataagtcatttagctatagcaaaacaaaggtttaagattcattagatgaacttagatgaccgcagggccagccgtctcgctaaccataaagactacaagcagaaaacacttgtaggtgtaagattgtacatgtgtctcctgccataactactttcagtttaaaggacaaagactttcttccttatttgcttttagaacacgtgtattacagcctatactctgttggattaattgcccattactatttattgttcttattttctattttaaagtggcagttactttgatactgagaatattttgggaacagagcaagtttatgtggtaaattctgggactttagcttttagtatcaaagaaagctttcctgacaacattgaggcacagccctttgtgcgttaagacatggcttacttcattccagcattagcagttgatacttgatcagcttgttagatgtagaaggtctcactgaagtttgagaatcacactaactttttaaagtagatttttgtttgtttgtttttgagacggaattttgctcttgtcacccaggctggagtgcaatggcgtgatctcggctcactgcaacatccacctgctgggttcaagcaattctcctgcctcagcctcccgagtagctgggattacaggtgcctgccaccatgcccagctaatttttgtatttttagtagagatggggtttcaccattgttggccaggcttgtcttgaactcctgacctcaggcattcgcctgcttcagcctcccaaaatgccgagattacaggtgtgagccacggcacccagcctaaagtagatgtttttactctcttcagagattttacagattaactaacttctgagtattttttaaacaactcttctttattgtgactttgcttcagtgagagcagaaccggaagaatgtgggacaagaacttgctggcctttttgagaggccataagcagatgaaatgaaaggaaatacatgagcatttttctggatgtatctttcttgtgcttttggtttagtggaagtaaagagtgtccttagggatttcttttgtcatgtgtctgtataaccatcggccgatctccaggttgaagaatgtacactgtggtctaaagttttgagatgttgcctgcttaaaatatctagttgaatagtgaaataaaatgcagtaaagattattagcttgaacctgccctaaggaaagcatagtgttaagttaccaaattaagatatttgtagacttagaaatcatgcattttaatctaacataaatgtttctatcacatttgcttacatagagaatattagtcgtagcaataccccttcttggttatagttttgaaagcattcttgtagaagttatttggtcctcacagtgtctccatgttagacctgccaagggaggtaggtacattgcagctgggaagtgttaagcacccggctcacagacgtgctccagaaccatctagcacccatctcaggctggtcagttgcagtcccttaagcttctcctctaggttctgggcttgccgtgttagacatcactctgtcagtattttaagggagataggcttcccactaaagtttacgttagatgaacttataaatgagatgactctgattcacaaaagcttgttgggctttgcatgcttttcataatttatggagcttactgtaatttacactgattcacatgacttttataagtcattatgcatgacatacttattttacttttttgagacggggtctcactctgttgcccaggctgcaatgcagtggcatggatctggactcactgcaccatccacctcccggggtcaagcaatcctcccacctcagcctcccgagtagctggaccataggcacacagcactgtgcccagctaatttttgtatttttctgtagagacagggtttcaccatgttgcccagactggtctcgaactgctggactcaagcaacccgccaatctcggcctcccaaagtgctgggattacaggcctgagccaccatgcccagactttgacacactgatttaattgttaacctctttttactgaagttgaacctcgaagtcatggagtgaacaggtggcagagccaatcataaaaaccatattctttctccttgttcattgctgacattctttgatagtcacgtccctaaacccaagtgaggccctcagagcactgaccactaaagaccaattacttttccatcaaagtgcaaagtggtaattcaaacttcctttaactgtcaagcatcctgggctacagagccaagaagataatcaacaatcaaaaggtgatacgattatttcaagttcccctctttagagttcatggctgttgctgatgatgctggtgccagagtagtgttttaaccttagcgctctcccatggtaaccacaaaggcagcaggagggcaggtgggaggttccagagttgtcagcacgttggtgaaatgcctgccctcattttaacgacgccgtggatgtttgtgtttgccttccgttggctgtttcaaacttaactttctagtttgacaatcatattttaccttcagtgattcttttgtttcagaactgattgtgtcctctaatagctaactaatatttttgtatattttgattatttctagtaatttttgttaattttattcatatatacacaatttggaaaatcctcttgctgtagttatgaatactttttatagatgctaagattttaaaattgctggaatagataataaatttgcaattttatttttaaatgacttaccttttttcccctactgtgtcaggaaccttaaaggcggtgtttcaaggttggtgggtctcataactgctttgcttgcttttccctgaaaggggtctgtcttttcacgggagtttctctaacgtgctttgcagagtgatgcttgccttactgcaggccgctgattgttttgctaatgctttttatctttgctttgggaaactgcagatctgaagctgtcttatttatggcaacttctgtttgaggccctaatgcttatgttggtgtggaacatcaaaagaatgcttcttaacccattttcaagccccaaaaagttgatatttcactagaccttagcttttcagctgttggagaagtatgcgtttttccagaaccattgtccattcactttagtgctactcaaaagagctgctcccagaaagctctggaggataaaaacagggcttccttatctggggatttgctgttaggctgacagtgaccagctggtgacaagtgtgacgccgggcacagcagtcctgtgaggctggtctggtgtcttgctggttccgtctggtcagaattaaagcagccccccgggaaagttggcctagaatgtagaacttaaaatggcagtcctcttttttctttttggttcacatatatttaatgtaatttaggtacacttttttacatctgtcagatttgaatgaaataactgatgtttttattgaacattgtgttcatgcttttgaagaattaaactgctttttctaaaggtgacgtgggattgtgtgtatgtgaacatgaatgtctgttttcagtttctgcattatttagatgcctagcgtgtgcaagatattttatgtagcatattaattttgaatgtttttaaattattgaggttatgtccttaagtaaatataatgattaaaatgttttactctggaagaaaacaaagttaggcattttagtgaaaagaagtttataattttccctttcgacatcttctgaagaatgcattgcataaaatattgtgttcttattttcaaacaggattttagtcaatgaaataagttcagcattcccttgaacttactttactttttcctctcgtgtttcaggaaactcttatcactactattgattctagttccaggtatgtggtagctttcttttaaagcagtagtgggtgggagggctcatgggtccaggttggacaaggtgcgtcccccaccttctgggttcctgggcctgacactgtgctgtctcagcaaccttctgctgaaggccagactgttcagagcactcagcctcaaactttcaggtagccgactgtgaacactgtccacagccacgtgatctagctggctggctgcatccaccccaaggaacaaacagaacaattgcatttccttttcccccagggcagcatcttaggcggccagtcccacagcacctccctggctcatccaagcagacatttccttcctttcaatccatgtctgtttcttaaactctagtgattacatttccctaaacatgggtcagttttcctttgtcatttttattagctttaaagttgaagctggtaatctatgtgtagcacgactcaattgttctaggcaccagatttgtttatgatagtccaagtgcacattaacatctttggcagctctaccatattgacttcagtagtagccacttttttggacccaagctcaaaaccacacatttgtatttcatcctgtcaaatttaactgcctcagtccgttggtgttctggaatattccctgcctgcaggcagtatttcaccttactcttcattaacaagccagtttctttctaaagtgaaattgaaaaaccccaccaaaccccactaagacaaaagttacacttgtaattcttatgaaagtttcacttgtaatccttatgaaaggattatacttgtagtccctatgaaacacatatgtataccaagtctatttctaaagcctacacattaatttccatttttctaagaaattaagtcaaagatcaaaatctaaagattcaaatctaatttaaagattcaaatagaggccaggcgcggtggctcacgcctgtaatcccagcactttgggaggccgaggcaggtggatcacgaggtcaggagatcgagaccatcctggctaacacagtgaaaccctgtctctactaaaaatacaaaaaaattagccgggcatggtggcgggcgcctgtagttccagctactcgggaggctgaggcaggagaatggtgtgaacccaggaggcggagcttgcagtgagccaagatcgtgccactgcactccagcctgagcaacagagcaagactctgtatcaaaaaaaaaaaaaagattcaaatagaaattatagctcatccctcctttgtccctgatttgatttgtaatctgtaatttatagatcgaaattctatgcatcaggactgtaaatttaggcttttttttttttttttttggtgaatttagacctgtggaccacacaccaagtagtctggccattctgtttcttaaccctttaaatccacttcagcacaggtagtaaagattagattttccaaacctaagcttaaagctgtggtgttaatggcagtgttaatcatcacagggcccatactcttcaactttacagctggtggggcattcattttttggtttgtttatttttgttagtttgtttttgagacagtctcgctctatcacacaggctggagtgcagtggcgtgatctcggctcactgcaacctctgcctcccaggttcaagcgattctcctgccccagcctcccaagtagctgggattacaattagctactgccaccacgcccagctactttttgtattttttggtagaaggtttttactatgttggccaggctggtctcaaacttctgacctcaagtgatccgtctgccttggcctcccaaagtgctgggattacaggcgtgagccactgagcccagccaagtggggcatgagttttctcataaagccagcagggcagagtgattcctagtatagcagggcatgtgttacactcatgtcacttttagcaaatccacgttgccttttcagcaaaattcattacagagttaagaaaaacatgccctggtaattttctgttagaaggagcaaagattttgagtccaccacagtgcacatcatgtcagcatcattgctttttgtgtctttctagttggtggaccaactgggtgatccctgccatctctgcagtggccgtcgccttgatgtatcgcctatacatggcagaggactgaacacctcctcagaagtcagcgcaggaagagcctgctttggacacgggagaaaagaagccattgctaactacttcaactgacagaaaccttcacttgaaaacaatgattttaatatatctctttctttttcttccgacattagaaacaaaacaaaaagaactgtcctttctgcgctcaaatttttcgagtgtgcctttttattcatctactttattttgatgtttccttaatgtgtaatttacttattataagcatgatcttttaaaaatatatttggcttttaaagtatgcaccgtgtttgcctgtttggtgtataattgtctttaatgtttagaatctggttatttagaggattccttcaatgtgttactcatccagacccacagaggccatatgactggaggtgcgggaaataggtttgagtgtctcctttcacatcgtcacatctcattgagtaaccatgtattgtatgcttccgatatagtttctttttttcaaggaaattaagaaaggccagaaattatagtttaaggatttctaataattgttctacttgaaatagatcttaaaaagaaagtagcggctgggcatcgtggctcacacctgtaagcccagcactttgggaggctgaggtgggtggatcacttgaggtcaggagttcaagaccagcctgaccaacatggtgaaaccctgtctctactaaaaatacaaaattagcagggcatagtggcgcatgcctgtaatcccggctacttgggaggctgaggcaggagaattgcttgaacccaggaggcagaggttgtagtgagctgagatcgcgccgttgaactccagctgggcaacaagagtgaaactctgtctcaaaaaaaaaagaaagtagcctacagggcctataagagagacttcttatcttcactgattgaaaaacatcagcaacttaaaaacacatgaaccatgagagggcatcgcaactgtccattctctcagcttacacgtatcattgcaaaggcactcacagcttcataggttctaaagttttaagaattcctcattcagagagtagaattgtttgtaaactcttctaaggaaaggctggttttctaatttgtaaggagattgtgggacattggaatctgatctttgaagaaatttagcggctagtgtcaagctctgaagagttctggtgtggctctgtctcctcctgggggctctaaggggctgattcagtcatcttacttcccatttattattctctgccttatgtgttattcttttaaatgtggaaacttgaaagctgaatttgttagaacccagtacatgtgtcattggctgtgactgcatttgcactggcatgagctgacaaaccacgaggttcttcagaagtgaccgcgtgcagtggaaaggaattgtgttgttcttacagagtacaacctttataatcaaataggatgcaccgcctttgccttctttagtcactgaaagttgacaagtagtttctatttcaaaataaattacaacacttgttaagggacctatgtaaatatttcaatatttttggttgtgatttttagctataaagcttcacattttagtagtttttaaaacattgctcctaaatcaactatgaagtgaatcgaagtgggtcagtcgtaccttagatgacattaaagggttaacttgtaaatcatttttaagatgttgagtaatagcatctgtatatcgttaagaaacataacagttgaactttgacatttttatcagtgactcagcaatttgctgctgtggctggcaatgtttcttcatgtgttttgggaacaacatgtggagtaaaggagagtttacttcctaattttaacatttacagtttgtgcagccagactctcaaggaaagatatttgacacttttttctctattgctttcccttcagagaggtgagagacttcagaggctgccctttcttttcatctgctgcttgtgaaaggaaaacatcttgggcccccagaatcactaaggaaaactcaagctggaaactgcttagggccaacctgcctcccattctactcagtcaagcctctgctcactgagagagaggcatatctgattgcttcctttggaaaggctaatcagaaactcagaagaatgcaaccctttgtgtctcacctctctgtgacctggaagctccctcctgctttgagtcttcctgcctttgcttcaaggtgtcccgcctttccaaacagaaccaatgtacttcttacatatattgatcaatgtctcatgtctccctaaaatgcataaaaccaagctgtgccctgaccaccttgggtacatgtcattaggacctcctgatgctttgtcacgggcatgtcctcaaccttggcaaagtaaactttcttttttttttttttttgtttttgagacagagtctcactctgtcgcccaggctggagtgcagtggtatgatcttggctcactgcaacctccgactcccaggttcaagtgattctcctgccccagcctcctgagtagctgggactacaggcgtatgccaccatgcctagctaatttttttgtatttttagtagagacgggatttcaccatgttagccaggctggtcttgaactcctgacctcaggcaatccacccgcctcaggctcgcaaagtgctggaattacaggcatgagccactgtgccgggcctattccttgactttcttaataaagttgttttcactttgcactgcggacttgccctgaattctttcatgtgcgaggtccaagaaccctctcctggggtctggattgggacccctttcctgtaacacagggactgtattgggtgcacgtgtgtcagttgctcacctcctgggtttgagttgatgattagggctctggttggaacaggcatctcccttcctctggaggtgtctagatgaaggcaagtggaagttctggaagcagattctcctttgcagcgtagcctttctgagaggtgtgcagacacagatggcgtccggatcctcagcttctacctagattgtgggagtttccctaggctgctgtaaccaagtacaccacaactgggtggcttagaacgacagaaatgtgttctcataatttagaggccagacgttgtaaatgaaggtttcagctgggccactcgccctccgacactctgggtggaatccttcctcacctcttccagctgccactggtggccagcagtcctcacctggcggtcctcacctgacagtcctcacctggcggtcctcacctgacagtcctcacctggtggtcctcacttcacagtcctcacctcatagtcctcgcctggtggtcctcgatgtggtcctcacctggcggtccccaccttgtagtcctcacctcgcagtccttggcttccggctgcgtcacccagggctctgcctctattgtcactgacatttttctccctttgtgtctctgtcataaggacacattggattacctaccccagcatgacttcatcttaactaattacatcttcatgatcctgtttccaaatagtcacactgaggtgctggggttaggacttcaacatatgtttttgggggacgtaggtcaacccacagcacattcttttctcaaagtgacctgatgtttatgcctgcgcttcttcctttactctctttcaactcaattcctcttctcccacttttcaggaaagaggcgatcttagctcaggccactgcaacaaaataccttggactgggtggcttaaaaagcaaacatttgcttctcacagttctagaggctggaagtccaagattaaggtgccagcagattcggcgtactcacatggtagggagaggaagcaagctgtctcgggactcttatgatgacacgatactaccccacctcctcatacctgcacattaggggacagggtttccatatgggaatttgggggagacattccatctgtgacagagacctatttctcacccatcctgaattttaatattggatgtgaaagctactgtcaaacatggtacatagtggggtcgtgagtctctgtaatagagacacttctttaatcaaggtaccccaccccaagtcaggctttgtgctttccttgtctggcgtgtgctctgctgacggtgaatcatagagtaggaacggggcgatttagccttctggagggtggttggagttcacatggacagtcagcagcaggggtgatgacattgcattgagcaatatctgttctaccatgctttcactgtctttgatgaaggcctccctccctcaggagtgccctgggagactggtcagatacatgaaatcatcttgtgatatgggtccacagaaaatcaaaatcaaatgtttaatttcactggtatgtgtacatttccattatagacaatgtgattgggaggcaaaagactgtcataatatttttcattaggataaaactggggagaagaaatagacctatgaggtcaaggagaaaaaggaacaatgtacaatttctttctactaagagtgtttctgcatctattacaaaagggtaatggcaaattgcattgatatttaaattccacttagcaaattttaaagagtgatatttcagctttattttaaaatgtcaatatttcaaatgttgcataacgatgccctttgtaaatatttaaactcattatgaaaattttaaagggcaactgaaggtgtttttcaacattcttgtaagggtaatttaagtagaatatgtgaagagcactagctcgtggcaggagcttgttctgactggctgcctctgcccgccaccgcctcacacacctgtccccacatcctttctccatggcctggccacactgtgaaatcacaacataagtttcaagcattgatagtgtatattgagtgaggttatgcactacacacttaattttgacatcagcctgcctgaatgtttttcttgcaaaatatttaaaaaattgctttttatttgttagctcatcagtccaaggcctcagcacatagcctggctcacagaaacattcaaggttttgagttgaaactaaattgtgaattgttttcatattttccgtggcttctaagtctttgatttgattttttaagactctgtactcctaactgtaagttggaatgactaaatctgaaagtattgttttaaaataaaggtaaggcatctttgatactataaagcagggacagaatgaaaaacaccttctctttccggaagacatctgttgtactgaaaatctgaagtcactcttgggcagaaaggaaggcttgggaggcttggagaccgcggttggaaacctggccctcctgcttgctagctgcatcgttttgagtaaattacttatccttgcggaatcttactttcctattgatataattcatgagcaacgcttcccttaggcctcgactagaggtcctgcccactcggaggaccccgtctggtccactggctgtgggcttccccatgggccaaggatgtgcccacctggagcctgtacccctccaaaccctagtacccccacacacagcccaatcctgcctgtaggtctgggtctccccagctcatcctcctgagggtcaccaggctctggggggtgcacatcagggccgaaagagtagccgagggctggtggtcttcagagagttggacaccctggatgagcaggtggggtctgcaggtagggtcttcctgagtgcacttggaccctgcatgtgagtggactggcgctgagaagggaagcggggagctgggagctgactcttccaatgccaccaccatctggcacagaactttgatgaatctgaaaatcctaacttcaaaagtgacctttctggccatttgtcaaggcaggtggatggggtatattttaagacttgtcagtggctgcacaacattaaaacactcggacacacgatgtgtgctcctcctgccccacagatgtaaggggatggtggctcctcagcgggtgaggattgaaatgaccacagagcagccgtccactgctggcccatgtgtctaattcgtgtttgcactttcccatccggacctcttaaagattgctttatgttaagatgaggtgtttggtgtataaaatttgagcaaaacaaagctgattgcagtaattgcagctaataatcacatccatgtatagaaatccctagaaggccaggctggcccagtatataaagctcccctttctctctcctgtgatcactgttgtccactctgtcaccttatctgaaggcaccatttggtttggctccacatcagggtggggagcactggcatttggggtcgtgctgtcaccctggaaggtgagtgtcactccttggtcatcagcattaccaagggcaagggaagaggaatggcagggcccctgctgagagctctgccatctcctgggaggagtggacacagaagccaggagacaatggggagacaatgggaggatggggagatagtgagggggtggggagacaatggggaggtgaggagatagtggggggtggggagatgacaatggggggatggggagatagtgggggctgtggagatgggggtggggagatagtgggggatgatatagtgggggatggggagatagtgggcggatggggagatagcggaggatggggagatagcgggggatggggagataggggatggggagatgggggatggggagataacgggacaatggggagatagtggggggatggggagatagtggggtggtggggagatggggtgtggggagatggggaattgggagatagtgggggatggggagataacagggggacaggcagatagcgggaggatggggagatagcaggaggatggggagatgggggtggggagatagtggggggacaggaagactatgggggacatggagacagtcggggtacagggagagtatggggaggtgggaagacaatgggggcacggattgatgtcaagtctgatgctcagctgcttagcggaggtgtggccggcagaggccagcaggaagaagtgtgctgggcactcagcacctgccagggaagctcagaagcaatcgaaaagggcacgagtttgtccaatagggatggggtgtcaaaggggttctgtgaggagacatattttgtaatcaatcaataatgtctgaatattaagagatcactaaatcattatgtaaatcctgaaacataaatcacagtcttccttgattttttgactgaaatgcgaatattttaatcaagatggaaaacacaacccaagttgttggtgggaaggagacatctgtcaggaaaagtccttaaaaatgaaaaaatagtgaggcttctttctctgctcttctctctagccccagcttctggtcactcctccttcctactgaaggcacagagtccagtaggccatgaagttggacatggaccacagcctccatgaagaccaggagtagaatgtctagcttgagggtgggtgggtggtcccggcatggtctcagttgccatgcagccagctctgcatctggttgtatttggaatctgtaggaccaggctgaagttgaccaagggcttcatgattggcctagaaacaagcatacaaccagagatgggatgccgtgggctccaccatctccactccttttaaagaagaaagaagcaagtgaaacaaatttgctttttgaaaaccttaggtctcccgaaaaaaaaatgcaaaatgttacctttagtccagataatttaagaaaccattaaaatgccatgttgtcatttttagattagaaagtttgacttgttttaatattcttgcagccacgagggaattctggaaataaaggaacactttgaagttgcagtagaaagaatttgaaattcacttgataattttaagtaacatcatatggagaaccttcaccaactttgagaattattgtttcattatcttaatatgctattgctaagctgaatttattttaccattatgattatgcttgtcatgtttataagtcaatagctgtttaaggagagatcatgtgagaattgtcacatggacacatttaacatcagccatgaccatggctcacgcctgtaatcccagcactttgggaggccaaggcaggtggatcacctgaggtcaagagttcaagaccagcctgaccaatatggtgaaaccccgtctttactaaaaatacaaaaattagccgggtgtggtggtgcgtgctggtaatcccagctactcgggaggagaatcgcttgaacctgggaggcagaggttgcagtgagccgagattgggtaactgcactccaatctgggcaacaggtgagatccatctcaaaaaaaagaaaaagaaaaatttaaccttgttataagtaatggtagcattacttcacatttcttttcttagttcgccagttcatgaacatgcacacaaaaatccatatttgtcttggaagaaaacataggcataaatcttaatgactttggattaggaaatggtttcttagataacaaaagcacacacagcaaaagaagaaatagatgaactgaacttcatcataattaaaaacttttgtttcaaaggacaccatcaagtaaccgaaaagatgacacaggatgtgagaaaatacttacaaatcaggtatctgagggacctgtatctagaatatataaagaaccctgacaactcaacaaaagacaactcaagttaaaaatgggcaaaagatctgaatggatagttctccagatgaaagtgcatgaatggccgataagcaggattagcatgctcagtatcattagtcattagggaaatgcaaatcaaaaccacaagatgccatttcacacccatggggaaggttataatcaaaaagtcagacactaccaagttctgacaaaggtggagaaattgtaacccttgtgcattgctggtgagaatgtaaaatggttcaacctctgcggaaaagagtatagcagttcctcaaaaagttaaacagaattactacatgacttaacaattccactgctaggtatataccgaaaagaaggaaaaacatgtgtttagacaaaaacttgttatgtgaatgctcatagcattatttataatagccccaagctggaaacaacccaaaagttcatcagtagatgagtggataaacaagtcgccttatgcctatacagtggaatattactctgcagtaaaatgtactatacatgctagaacatggctgaacctttgaaaacatttgctaaatgaaagaagccattcgtaacaggctacaaatggtatgattcaattgatatgaaatgttcagaataggcaaatccatagagacagaaagtggttacctagggctgggaagaaggctgaagaaaactggggagtggctgataacgggtgcaggatttctttggggattgataaacacgttctgaaatgaattatggtgatggttgcataactctaaatgtactaaaagccatcgaactgtacactttcaatgggtgaactgtgtggtatgggaattatatttcagcagagctattgtataaaaaaactcaacatagtcaaggtgaactcattctctatgcccaagaaattgtcccgtccagcatttctttctttcttttcttttctttcttttttttttttttttttgagatggaatttcactcttgttgcccaggctggagtgcaatggcgctatctcggctcactgaaacctctgcctcctgggttcaagcgattctcctgcctcagcctcccaagtagctgggattacaggtgcatgccacctgatctgtccgcctcagcctcccaaagtactgggattacaggtgtgagccatcgtgcccagcctcagtgtttcttatctcaggagcatccacccaggtcatgccagaaacagggtttcttcttcacacccctcaccttcggcattgcttcctacaatcaccactcggttaagagtggcttcttgtaaagggtgagatgtgaagccagaggaggggcttttactgtttcactccatactttgttcacttacatatggttggaattaaatatatgacttttgcagctgaagataaactgatcgctgatgtgtactgtttgtttctagatagcctcagtggctgctctgtctactctcttgctagtgcccatccctcctctccacctccagtgccacggccctcatctaggctgcagctcggctgctctgagttactgctgcaaaagctcacttcctactcgcatctggatctgcccaggccattatttctgt

SEQ ID NO: 129 - DNA, 664 bp, Homo sapiens
tgcttgactcctgagaccgcggtgtgtggctggagcaagaacacagaggccaggcagagcagcggacgttctgcgtgggactcgcccctaacagctttgacagcatcctggtggggaagaagttttaagggaacaagctggaggtgacgctactgagaactttgaggatgtcgggcactctacagatgccagggaaatgtccaaaacattcatcattggggagctccatccagatgacagaccaaagttaaacaagcctccggaaactcttatcactactattgattctagttccagttggtggaccaactgggtgatccctgccatctctgcagtggccgtcgccttgatgtatcgcctatacatggcagaggactgaacacctcctcagaagtcagcgcaggaagagcctgctttggacacgggagaaaagaagccattgctaactacttcaactgacagaaaccttcacttgaaaacaatgattttaatatatctctttctttttcttccgacattagaaacaaaacaaaaagaactgtcctttctgcgctcaaatttttcgagtgtgcctttttattcatctactttattttgatgtttccttaatgtgtaatttacttattataagcatgatcttttaaaaatatatttggcttttaaa

SEQ ID NO: 130 - protein, 58 aa, Homo sapiens
MSKTFIIGELHPDDRPKLNKPPETLITTIDSSSSWWTNWVIPAISAVAVMYRLYMAED

SEQ ID NO: 131 - DNA, 763 bp, Homo sapiens
ctggctgagtcgcgcgctctgctccacccgacggggctgtgtgtgctgggcctggctcgcggcgaaccgagatggcagagcagtcggacgaggccgtgaagtactacaccctagaggagattcagaagcacaaccacagcaagagcacctggctgatcctgcaccacaaggtgtacgatttgaccaaatttctggaagagcatcctggtggggaagaagttttaagggaacaagctggaggtgacgctactgagaactttgaggatgtcgggcactctacagatgccagggaaatgtccaaaacattcatcattggggagctccatccagatgacagaccaaagttaaacaagcctccggaaactcttatcactactattgattctagttccagttggtggaccaactgggtgatccctgccatctctgcagtggccgtcgccttgatgtatcgcctatacatggcagaggactgaacacctcctcagaagtcagcgcaggaagagcctgctttggacacgggagaaaagaagccattgctaactacttcaactgacagaaaccttcacttgaaaacaatgattttaatatatctctttctttttcttccgacattagaaacaaaacaaaaagaactgtcctttctgcgctcaaatttttcgagtgtgcctttttattcatctactttattttgatgtttccttaatgtgtaatttacttattataagcatgatcttttaaaaatatatttggcttttaaagt

SEQ ID NO: 132 - protein, 132 aa, Homo sapiens
MAEQSDEAVKYYTLEEIQKHNHSKSTWLILHHKVYDLTKFLEEHPGGEEVLREQAGGDATENFEDVGHSTDAREMSKTFIIGELHPDDRPKLNKPPETLITTIDSSSSWWTNWVIPAISAVAVMYRLYMAED

SEQ ID NO: 133 - DNA, 673 bp, Homo sapiens
tgcttgactcctgagaccgcggtgtgtggctggagcaagaacacagaggccaggcagagcagcggacgttctgcgtgggactcgcccctaacagctttggaagcatcctggtggggaagaagttttaagggaacaagctggaggtgacgctactgagaactttgaggatgtcgggcactctacagatgccagggaaatgtccaaaacattcatcattggggagctccatccagatgacagaccaaagttaaacaagcctccggaaactcttatcactactattgattctagttccagttggtggaccaactgggtgatccctgccatctctgcagtggccgtcgccttgatgtatcgcctatacatggcagaggactgaacacctcctcagaagtcagcgcaggaagagcctgctttggacacgggagaaaagaagccattgctaactacttcaactgacagaaaccttcacttgaaaacaatgattttaatatatctctttctttttcttccgacattagaaacaaaacaaaaagaactgtcctttctgcgctcaaatttttcgagtgtgcctttttattcatctactttattttgatgtttccttaatgtgtaatttacttattataagcatgatcttttaaaaatatatttggcttttaaagtatgcacc

SEQ ID NO: 134 - protein, 58 aa, Homo sapiens; identical to SEQ ID NO: 130

SEQ ID NO: 135 - DNA, 1174 bp, Homo sapiens
ttgagttgggaggtttgtttgattttgtttttggtggtaggagatatgtactttgagggagtaagcttcattcatctgacaagtttatttgccccgatattttcatcccatacttcacaaaggcaaagtgtcttagggtcatcagggaggcctgccgttacacatgcctgatcccatccttgtttccagctgtgggtcaggtttcaggccctgactgtggcacttctgcttcacctgcccactgggcttccccctggccagcctttaaacacactgtatttttgacagcttcagcctgaagttgaaatagtttatgactctaaaactgggagactgcagggcttaactgaagatatcatacacgtaagagatacatgcacaatctcaaatggaatttgagaggacagaagggaagaatcagtcttcagctcctccctgaattacgtgtcgcaatctgagtctaataaatgtgtgtgcacatcagcatgtacagagagctgtcatgggtgctgttcgaaactttggaactctagatagaaaatatctcttggcacttaatctgctactaatttttgctgttaaatcagatggatcaaactttgtgtttaatagctaaatgttgaatctgaaatggtaattactgaattataattttaaaaagtctcaaagtcagcattttggaagtggtactttcatagatttttaaattccataatgtgccttatcttttcattgcaggatgacagaccaaagttaaacaagcctccggaaactcttatcactactattgattctagttccagttggtggaccaactgggtgatccctgccatctctgcagtggccgtcgccttgatgtatcgcctatacatggcagaggactgaacacctcctcagaagtcagcgcaggaagagcctgctttggacacgggagaaaagaagccattgctaactacttcaactgacagaaaccttcacttgaaaacaatgattttaatatatctctttctttttcttccgacattagaaacaaaacaaaaagaactgtcctttctgcgctcaaatttttcgagtgtgcctttttattcatctactttattttgatgtttccttaatgtgtaatttacttattataagcatgatcttttaaaaatatatttggcttttaaagtat

SEQ ID NO: 136 - protein, 54 aa, Homo sapiens
MCLIFSLQDDRPKLNKPPETLITTIDSSSSWWTNWVIPAISAVAVMYRLYMAED

SEQ ID NO: 137 - DNA, 107432 bp, Mus musculus
  misc_feature (1)...(107432): n = A,T,C or G
atgtaaatggcagggcttgtgctgctttggaagcttcagtttctggggtgttaggagcaagtctgagggaaactagaaatgagtttcattattattttgatattccatttaaacccaacttaccctttaatacagtctctctacatatgcatatatatatatatatatatacacacacacacatacacacatatagtttattaaaggtatatacacatatactttgattgtttacaagattattacatttgttatatttaaagtgtggtttagttaggcaataatttactctttgaattgatttataagcctctgaactttgggggattaatctcatactgtttttaccaagttataaaaatcagacaaaacccggagaagcaaaactcttccttcctgaacttgttgagtgtcaccacaagagcctacgctgacttgctgttgggattttcagtttcagtatctgctctctgtgggacaaactaggcaggagatcaagtcacataagagtcatagggacttaggagagtaccctgagggatccatgtggggttcttcaagggcagcctgctgcggctgctgctcaggtagcttcctaaggctgatacagtggagctgagttctgagggctggacgaaggacctgcttattggaagactcagtggtgggaaaactgtcatatcagagccccaggcagccattgtaactgaagttgacttagtgaagaattgggtgtggtgcagaggggctagaaggagtcgagagtggatggggtgtgtctttggggtcagagacaggtggagggttctgtaggcatccaggctgagtcgcacgcatttgggtcaagtgaacatgggagatagttgaagccaagatgtgcatgaacttaaagggagtgagggtttgtctgaagtggtgcttgctcctttgcttctggcatagtcattgaatcattgcctgcattgcctttgatttcctggtccgtacacctcatcctagcaggcattgtgctgcaggctgggcacacagacaaaccagataaatcgttgactcttgggctggagagacggctcagtggttaagagcactgactgctcttctggaggtcctgaattcagttcccagcaatcacacagtggcttacaaccatctgtaatgggatctaagagagccacagtgtactcatatacataaaatagataaatcttaaaaaaacaaaaccaaaaaccctttcaccctaaagtacaagaaacgacaagaaatgaaataaattatggactgatggtgctctcacttcattggcttcctaggaagaaaagcgatttaggaagcgccccagcaacactgagagagtgtgtgactgactcacaagtcacaccggcggggttcatacccatgtgtctggacctaggtcctatgccatttcctgtatacccttcacctctcattctgctgaacactggactctattttgtatttgaggagatggcgatgactggcaggtgtggtggtccttgtgcttgcttgcaggagtaaggaaggaaggaaggaaggaaggaaggaaggaaggaaggaaggatggatggatggatggatggatggatggatggatatgggcgcttcaggtcctgtgctccagatcctgcgcagggattgcgtgagtcttttaggaaagactcactgtggagttctttccctgtgcttttccagacatttcttgaatattagtgttgtagctgaagacttaatggcacactgatcaaactgatggctggtgtcagccaagaagtgtagttacatgttagaagtccttaaggatctcaacaagtattgcatcaggttaggaacagtggccaaaaataatcaaatagaaatagcagagatacatagacttctgccacacggctcaactatcctatataatccaggtgtccactacacgatggggcaagtgcgtttggtcactgaccagggatggccatggagagagaggagctacattaattttaggctacattaatatctgggtaggttttggaagaaagtaaacaaggagttaccctgaaagcttttgtgtgaaggggcaagaatgggtatttcttactccaaaaagggaaggagctacaggtgtctcagataatccatcagaggtgtggagtcaagctcctgtgggtataaatgacaaggacatcgcctagagaaggaagaagcagagcgtccccagtggcgggcacctggaggggctgcagactagcaccagtgctgctcttttcacttctacagctctgagcctcactgctgactccttcaccacactgacgtgtggccataggagaatgcactgaggtgccttggaaataaatgacatttgctgccatttgacagtgtcagcaaaggctctgaatgagctttcgagagggtggagtctatgaacctccaaatctgagttaaatttaggacctcagcacatcatagatttttttttttaatttacttttcaagttttgggacaaggcctcactgtgtagccctgaatagctaacctggaacttggtatgtggcccaagatggctttgaacttgagagagagacagagagggagggagagagggagggagggagggggagagagagagagagagagagagagagagagggagggagagggagagggggagagagagagagagagagagagcgcacatatagacattgccataccattcttttaagaaaaaagagctctcttcatcatcaaatgtcatcacacagttccccgagtgtgttagggagtcctgactgggaatctaaggctgctgtggcagtggttgttctccagagcagggtgagtggtctggcacccccaccaccttcctctcatgctgctaatggagcatagtcatgggctgcaccaagagtttgctgtcttggaatagccagcaggaaacgttttctttggctttgtctaatgtctgagagatttcacacctgtatccgtagtgaatgccagacattttgtattggtagaagaatgtggtagagggtgttgactcctcaagtcccagtgacgtagatccatcttaaatggactgttctgtcccagtacaagtcaaggcacacagtctgagaatcagacctgagcccataatgttctgccccttggagccttcctgtgtcatctggatgggagtccattggcctttggttctgtggaaactgagaaccgtggtactttaacacttgaagatgactagatgcttttatgaaaggagggaatgagtctttggagccctcctcttctagggaaaccaatgttaaggcctttagaatggttaccgaggaagtcacttataaatgagcgctgacatcatgtgtgtctgctgtcctgcatgcatgaattgccaggctgagtaccagtgctgactttttgtcctgaaaagctttcctttttatgatcagagctcctaagcagttaccaagtggccacagctatccagatcaactgtgtataagatgagaaagagcaccaagcctgagtgtggtcaagggtgtgctagggaggtcggaaatctcgtagggaacacgaaaaacatcataaaggggtgaggtagcagcataagactccacagaaactgtcacagggcagcccggggacatttcacagtggcatggtagcaggtgctggtgattgatgtacagcgaaggggacagatctctgttggggcaagagtgagccccagctattccactggcttctgccctgagcctggatgccagggagagagctcagtgctggactgtgggtctcagttcttccctgctgcagaaagtcagggcatcggaagcactgggttgatagagctgtagagaggaaattgctttaccgtatgacagctgtacactggccccagtggctgccctagtccttatcagcccttttcacagatctacacttgtatgcatcacaagtactactcagctattaaaaacaatgaatttatgcaattcctaggcaaatggttggacctggagggcaccatcctgagtgaggtaacccaaccacaaaagaactcacatgatatgtactcactgataagtggatattagcccagaaacttagaatacccaagatacaatttgcaagacacatgacactcaagaagaacgaagaccaaagtatgaacacttcgccccttcttagaattgggaacaaaacacccatggaaggagttacagagacaatgtttggagctgagaggaaaggatggaccatctagagactgccgcacctggggatccatcccataatcaacctccaaacatagacaccattgcatacgccagcaagattttgctgaaaggaccctgatatagctgtctcttgtgaggctatgccggtgcctggtaaacacagaagtggatgctcatagtcagctattgaatggaacacagggcccccactggaggagctagacaaagtatccaaggagctaaaggggtctgcaaccctataggtggaacaacaatatgaactaaccagtaccccagagctcatgtctctagctgcatatgtagcagaagatggcctagtcggccattattgggaagagaggccccttcgtcttgcaaactttatatgcctcagtataggggaacgccagggccaagaagtgggagtgagtgggtaggagagcagggtcgggggagggtatgggggatgtttgggatagcatttgaaatgtaaatgaagtaaatacctaataaaaaataggaaaaaaaaccccagactgtagtttgtacattccttccccatgtccccacaccccactgtcttgctatggcatgcttgtgcattgcttttgtgactgtagagtagttaggtttgttccggtttttctttgaacttttaggttgcagggtttcaggcacttggtggctcttactatatctatcgtatctgactgtctgtctatttatcatctatctatctatcatctatctatccatctatatctatcttatctgtctgtctatctatcatctatccatccatctatcatctatccatccatccatcatctatccatccatccatcatctatctatccatctctccctccctctgtgtgtgcgcacgtgtgcatgtgtgtgtgcgcactcgcccgtctctgcgtacacctggtagagcgtgtgtgaggagcagaggatagcttgcagaagtctgctgtctctcctactgtctgcatcccagggatcctgctcaggatattatgcttggcagcgggagcttcacccctgagccatcttgctagccctgtttatagttttttatacctgtttgttccagtacttgttcatactaggtttgattatttttgtcagcttcttaggcgatggggtattacttcagtcttttcgtagttaccagcagcaggctactttccccagtgactgaaaagctcttgtttaatccgaatgtgtaaatacattgtagattgaggtgtgaggtttctctgttgggggtgtggggttgccaagcttttctccagtttgtggtttaagaaattgtactaagaaaatcataacaaaacatttggtaaattaggtccttaatttgacatttaggggtaaaataaacttacataggtatcctcactataaatacatgtgtaggcatattctgaaatggtgactctgagtgactgcctgaatcacactgacatctaggagctgttgccttccagcttggataatttacccaggaggactcccaggctggcttttggaaccctataagagcacagcaggactttgttcctgttgtgcttaggtctatacccaggtctgctttcaaactgggtcacacttcctgtcctcacgacctactcccatgcatgggggactgaggctgttggaagacaaaacaggcaacatcaagtgcctgagtggtatgtgtgtgtctatgtatggtgtgtgtgtgtgtgtcttagagggagagatggggaaaggagggttattggttaacaaagcaatttgaaagtcttaacaagtaataaaacccagtctggttgtgggctagtggctacttgcatctcatacagaaagcatgtgtctcaatgggataaaactcacaggtggccttgtgcaatgtgcttggaaagaaactctaccagagcaagccactcagtgaggtgcttggagaccttggaccagaggaggcctggtagagcatacattttatgtgcgaaaggaaaatagtcacattctagaagcatcctacctgaggactggccaaaaccagcagcaggatgtgaggttcttcgtgcacaggaggatcagcttggcctttgtcttccctggaacagtcttggttttgaatgacactgtggtttctttatagagctagcagtgaagagctagggcgaagctgggctacttcattacatgttttaatgttcaaatcagcaagtgctcagagggatggatttggattgtggatgagtacctaaggtaaggagaggtaaggagagaaaggaaaaattaaataatgtgccttatctgagtaggcctaagatttcatccaggaagtctcccaagcgagccgatgcctctgagctggagagactctgtgtctcatgttcttgagttttgtgagtctggggtttagctgacagtttggactcgagtgcaaattaactgcattttacctaggaccaagttgctgagacagacactacagaacagttgcctccactgctgggcgagtggcgcctgggctggcgtcccaggcccgcattctgcactctgcacattttacaatttaaactctgtgcttccgtcacggcagtttggactgggcattatgttgaggggaggtgagaggctcctcctgtgttggcaccgtctgaccagtgtgggcacagggctgctgcagagccctgatgatgggatgggccactgtactggctaactttgtgtcaacttgacacagctggagttatcacagagaaaggagcttcagttgaggaaatacctccatgagatccagctgcaaggcattttctcaattagtgatcaagggaaggccccttgtgggtggaaccatctctggctggtagtcttggttctataagagagcaggctgagcaagccaggggaagcaagccagtaaagaacatccctccatggcctctgcatcagctcctgctccctgacctgcttgagttccagtcctgacttccttggtgatgaacagcagtatggaaatgtaagccgaataaaccctttcctccccaagtgcttcttggtcatgatgtttgtgcaggaatagaaaccctgactgagacgccaccaacttgatggcaaacacacagcctctctgtggccactgttcctttggctgggtttgaaattaccagttcaaccatggaagaaagttgtgttttgtcttggaaagaacctggagaagaattcaccctgctttcataagcacacattgtaatgtcaatactctgaggagagcttagttccagatcttggtgttgccacagacatgtgtctgtgtgtttgtcaggactgccgaggttacggaagagccatgtgctgactgaggaaaaccatatgccgtcgctcatttccagttattttaggtgtaagttctttcgaggtgaaagtaatagtttaaacccccaatctgtgaatatgctggcatatacccgtctcccaatctatctgtgaatatgctgggatatatccgtctcccaatctgtgaatatgctgggatatacccgtctcccaatctatctgtgaatatgctgggatatacctgtctcctctgtgttccacagttggttcattgttgacgggtgggtgtctctgactgaggccaggtgtgtcctacagtggcctgccactaaggctgtgtgtcaactgcctgcatcctggcacagggacatgatgtctttctcctcacatccatcatggctgcgcatccctgggtctccagtgcagtgcagtgcacacccactctgctaaaatcatcacaggcaggcacacggctgtcatcagatcactaaaatcaacaccaggtgacctggaaggagaaatggccacctgcagtcctgtggagggaggtggggggaggagcaactgggagctctcacaactccttcagccgcctgttgctcccctctccctctccccaccattatgcctcagggctgacagtgtgactttttttgcagagctcagcagatacctgaccaagctgagaatgtttgtgggtccaggctgcccaccttctcatgtggcctgctgggctctgtcggcagtttagttgctccatgaggtctccacctcttcgatgacagtatgctccctggaattctgaatgcagtttccgatgctctggtttctttgtggtctgttttccccttctgcctaaatggcattgctctcttttcttccatcattctctctgtcccccctccctccgcccccaacacacacacctttcaaactttatgttcacacttcccttatactcttgatcctctgcctcagtctcctaggggctggaatactcgccatgtgccttctacctggatgaagttaatggctttacttgccaattcatcccccgtttattgagcatttactttgtgccactttgacctttcacgttacatcactgttggttcccagtctcgtctccactgcattttcctcaatccctgtcttaccacctgttgttcatcacattgcagacttcaagtctgtgtgtatatgcttggagtctggccttgtggcctctgtcactgctgtccatttagaacctctgtcttacctggccagtgtggcagctggccctgctttcagctacttcctgagggggcagtcctgccaggtggctcaggtgacagccttctatactggcacccaggggttatcagaagaggcagcctgagatgacctgtcaggcttgctcatgctcaggcctcagccctgttcaacaaactcccagcctcctgcatggtacaaaccccaggaacatccatgtccttaggcacaccaggtcatttagcttctgatgttggagctctgtgttgtctctccctccctgagcctgcatttccacttagtctgcacatcttcctgagggtccacatgtgcttacaccttgtgttctgggagcctggcacacagtaggtgtccacacttgattctatttagtctgcacatcttcctgagggtccacatgtatttacaccttgtgctctggaagcctggcacacagtaggtgtccacacttgatttggtatctgtttgtgaaggctgtggctctgtggcctttggtgcaggggagttttccttcacagccctgctgctttgaggagcccaggctgtgagggccctgcttgaagttctgctcctacctctcttggtcaagcagtctcactgatggccttggcctgaggctccaggactgattcaccagaccaaaaataaaatccagggtctagatttgaactgctgtgcttggtgtgatgtttactggcctgtgactcgtaatctggggcttactgctgcacactcattacctttggaaaactttatctaaaaacatttttcattacttcagtgaatagccagggcacgaaggcttctttaagacttgtaagctcaggtctagaagatcatttttagatgacagagttctggggtacttggaatcaaaatcgtgtttcctgttttttaggatttttagatatttatggaatagaatttttccttatagtgtttattccagatctgaactttaaaatcctatctgaaagttagtaaaaatattttttcctttaatattctgggataatattaatactttagaattatgatcttttatctcaaaatttaggtagatgtgttaaatgcatatatttaaacacaaaggttgtatttgttataagtgatagctagtaaacttgtttctttgtttatatttcttcacagggcagcccgatggacccaatggtgatgaagagacctcagttgtatgggatgggtactcacccccactcccagccacagcagagcagcccatacccaggaggctcctacggtcccccaggtgcacagcggtatccccttggcatgcagggccgggctccaggggccctgggaggcttgcagtacccgcagcagcaggtcagtgtccgctctctctgtcttccagggctttgttgagagcttttgtttttacctgttgatttctacctattattggtattgagaggatttggggatgtttctgtgatatccccccttttcttttatatagatggaaagtagaactcgcaatcaaatagaccattttatttttctctgtccctgtctccctccctccctccctcctcccctccttcccttccttcctttttttccttcttgaaattgtacttgaacaatgtggggaaagctcctgcttggtaaggcagtgttgccccttccagttccaagggtaggccctcagatgctgacctgtggaaagactccttagggtgaagttttccagtcattcaaagttctgtcattgttgcttgagttaatctggttgttaacccaggatgcccttagactcagtctcccagaggggcattacagctatacgcctccaacctgggttagaagcttcccgggaagttactttgcattgattgtggcatgttctagaagaagtttcagtatttcatttgtgaatttggttagttgtcttgggtaagagaggcctttcctgctcttaaacagaaggctccatcctttcctcccctccagaaccatgtggttttacccacccatgacccctgcttgtattagcacagctcagggtcttcctggttcttacagtttccttgatagattggtcggcggaggcatgggtcctgggaagggcacggttagatccagactcgtcaaggtatttagcgagtgggagcaccagaaaggctgcttacacactgccctagtgtgcctggcatccctgagggccatgaggcgaatgggggagcgctttactgcctccagactggggcggtcctgtaatggtggtcctaaagccggcagtcagcagcagcccttccccacaggaaacgcttctagattttacagaaactcttccttgaggaggcaagtctgatgaaactcttgtcctcttaaaggtctctttagtagtctgagctgtctgctgtagttgagtattgtcagccctcatcttgcagtcacagggaaggatagaattaggtcattaggtcagcccttcagccctagcatggatcctcagactgttcttggtacattattggcaacctccctccacagtgtcaaagacagctctgagtgcaggatcaccctgcttccttttacccgggttttctgccatactttactttcttcagagttgaagcagcagattatgtgtgtctgtagtggggtggggtagggtggggtagaatgtcccccacttcctcaaccccgacaactctcagctgttcccccaccatgaaccttgtattgttagagccgctttcctctctgtgaagaggagaagccccatgtggcagggagctgaaggcctccccttacgtacagtctatagaatggggtgcaaagctctgtctgctacggaaggaaagaggcagagaggagagcggtgggctggtgcaccatgattcttgtgcccgtggctccagcctgttttcccatgattccctgatgtgaggttgtggagtcattctgaaaatggagagccctttctctcgtccctaaggaagtccagggcttgttagttttagactgtggcctagtttaccaaactagagtgagagccaaatataggaagtttgtgaagaatggctagcaaggaaattttatattattttcctcctcaagtgtgtagggtgaaaaatagatctgcagtaagatgtaatcttcgttttcttagctccttggttttatgtagtcccatgacccttacacacttatttgaaaggacaagttgctgatgacccatcaagctttgcagcaaatggcttcagtgtgagtttttaaaacattaataattgtgagtgtatgtatttatacatgtgtgtgtgtcacagcatgtctgtggaaattaaaggatggcggtaggaactgtttctgaccttcaagcatgtgggtcctgggattggactcactttgttcggcctgttggcaagcattgtggcccactgaaccatctctctgccctcagcacatttgcaattaagattttagctcaggtatttactgctaactaaaaagaaatatccagccgggcgtggtggtgcacacctttaatcccagcactcggaaggcagaggcaggtggatttctgagttcgaggccagcctggtctacaaagtgagttccaggacagccagggctacacagagaaaccctgtctcgaaaaacccaaaaagaaaaaaaaaatccaagtcaggtgcataaatatttctggtgatgaaaagaacatggtgaatgttctggctgcagaaatctcaagctttcacgggaagttagtcaaagtcaggcctgtaattggctgtgtgttaacctttcagtcactgcgagacagccttgtctcattttgaattttcaaagactaaaaaataggactaaaaatagtttggaatgaatttctttttgagtgcttgctcacactgtaaaggagacagagcgtcaggtattgatgtttctcctcacccggtggcactgtgcgttgaccccagagcctcaggcataggagcaagccctcaaccactgaggcaaagcctctccccagtgcacacagcattgagaacacagatctgcagaatggttcttagaggtggaaacagagtagctagtaaaggttttgagaagtagttaccagatcacactgcacatacatacatacatatgcacacactgcatgcacacacacacatctgtaggctgggtgtacttgtgcacttagttgcatgtgcctatttaagaaaggtttttaaactggctttaacctcacagtgtaggcaagagtaggtttgaactcctggtcctcttgcctctatctcctaaatgccgggattaaaggcatgtgctaccacactgggcttttggtctggttttttcccccctccaagatctggaaattttaagtgtgtctgcagcaaggtgcaggcactatgattggctattcatcttgccatctcctctggggattaatgtaactggctgagcattgtagtggcgtaggtacagcaactaaggttcttacgaggagtgacgggcggatgataattatgacactgagggtttactgagtggacatcaccacctaggcataggcatagctttgctttggatgccttccaaagctttctgtgcttggtttgtgaacctctaatgagctgagtccagttcatttagtgttgctcatatatttctgcagaggtttgaaatgcaggaattcaactttgtaaattgagttgcccacttaccagctgagtggtaagttgtctttggctcaggggtcacagtttgattcctggctggcactctgcttctgtgataggaatttgaaatgaggattcccttagaactacggtacttgattggaatgccgccctgttaggtcagcgcttagcctttctctctcagttaggcggagctggccactgactgggtgacattagtgttaaagccattggttcttgttttgtgtggtggtcgttttatttttgaaatgtacctgtgtctgacttactgaagcatggtgtggtaatagtgtgctgcttaggtttctactgactggaactagatttgtggtcttcgctcgcttgcttctctcccacatcatcagacaggtacatccctaaacagatcagctttgcaggctcccctaaaacctcgtctatttgatttttttattgagttgagggggaaatgagttttctatgcttctgtggagaatgttctgcctgcaggcttttggagcagacctggagggtcagcaagccggtgatttcatccagtacagagccacccagaagtgcagcttcaagactggctcgcacgcactgactgaggttttcagggctcgcttttgtttttgttttttaacttaaagatactagggtgttctttgctgggtcaggtgtgtggattagcaaaggccttatttcatttttttgcagattctgtactcataaatgtatgtggactgttgacagcttactctaagagattttaatataaaataagtaacagtgataaagaataatgagcatagaagctgagttttattagtgtgggtagatttaaaacaccttcagagactcccctcccaggtcttggattcatgggggtttatgtctcagctgtctgtaccatgctgcgtatctgggaccaagacccctggtccttagacagctgggagacaggaagaattggacatttgattggatgtttttagtttagcggttttgtttctttcttttgagactatgtcttgccaagtgggccagactggcctggaacccagagatcatctcttcctgtcttctatgtgctgtgactaaaggctggtgccccacactcagcatatgagcatttttatgagaagaacccacgtttttagtttttacgaagacctttacaagaaagtgtgggatgtgatcattgtgaaagtggccaaatttagtagaagttagtaacttttgtgaaggtgttttatctgaacatatcaattcaaatggagatacaaactgaattaaaaatggattcttctacagatgacctaagatgagatgaacacgctaacctgtgtttgtttgccatctccccttcctggccatatctcctccactgtatatttatttcagagcagaagcgttttttgttggtatcatctttgcagccaaaatgcatcttcaagtacacattagatagttctaaaaaggaaacaaacattacaattgcttggcaaaaagaaaccttttctttgtggttattaaggcagctgagtggtttccaggatccttacctgggttgttatatttttgatatagtctagaaaggaattctttgtatgcacttagaagtcataacttagtagagtttgcagagctgttgtgaaaggtaggctttgtggagagaaggcttgttcacacaacacttcagacgtgtgcttgtgaaacgcttgtgttaggctctgtccattggaagtctgaaaaggtcctgtggttttggttgtgtctgcaatgctcagctgtcctattttcgaggggcgtgactgagtgaaggagaaggcttgacttgggacagtgttgaggaatctgcgcctgttatgtcttacacttagaatcttaagaggttttggtagtttcatatttgcttacaaagatccccacatgtctgtgtgcgtgcatgctcatgaactggcttataaaacatttgtgtggcattttcccataatgtattctatatgctaaacatagtttatgtacatacagatacatatatgtaatcccacaactacagaagatgaaggcaagggttttggccgttacagctataaacgctgtggggtttattggctatgtggttcattgcattttatgtggttgtcctatgtgccattgactggagctaagcagctttgctttgcagctgagatgctgggacctttttttcactgactttgttgcctctgttgctcatgcagtgaacacgaaggtatctaagttttatcaaaagactcatttagagagcgcatgtctgcttgcttgaggagagatagcagatgtccctagtacggatgccagtgtgtcctatagatgcagtttcctactaaggaagtatttctgaaggaattaaactcctgcaactcttgtttcttgtagttagattgaaacactttgagacagtgtgccattgtcagtaaatttgaattagaagagcctgctgtgagtccctgtagattttcagacctttacttttctagaagtaaggtgggatgcgctttagtgagaactgttaggtgctcctcttcgcttggtttggaagctaccttggcatttgttcttcagagagcatttacagaattctagatatgcggcaggtataatatcctgcctgctctctgctgcggttttactgtattctttcttgtatgatttctactgtgtcttatataaggagaccctcaactcaagatccctgctacattttcctattatagttttatttttttaattttttttttttctgaccaaagtgcaagctttgaaaagtgacatcctgatttttatttcatacatattggtgttttgcctgcatgtctttgtgagggcgtcaggtcctctgcaacagggggtatagcagttgtgagctgccatgtcagtgttgagaactgaggcaggatcctctggaagagaggagcgctcttaaccgtggagctgtccattcgtcacctatagttttattttatttttcaaaggtgtgacttatttattttatgtacatgtgtacactgtcactgtctttagacacaccagaagatttcatcagctctcattacagatggttatgagccaccatgtggttgctgggaattgaactcatgacctctgaaagaacagtcagtgctcttaactactgagccatctctccagccctatagttttatttacggtgtgtgtaaatcatcagtgaggatttcaggtagcacagaatcactttaatacttttaataaatctcactcacttgctgtcacccccaaacccagtaggacatatttatgtgaaattattagccacagttgacctcagtaaaatcaatcaaccgcattcttccattgtttcctgaaaacagaaacaaaaacaaataaaaaccaaacccaaacccccagaggattaaccgaaagagaaagtaagtatggcattaggttgggtggctctcccgctctgctgaggttggcatctctgaaaccagtttggagccctgatggctgctgggatggccagccctgtggctctcagagctccttctgtgatggtcttgaatagctgcatgtgcgagttcaagttcagcgctccttctgtgatggtcttgaatagctgcatgtgcgagttcaagtgcttccaggcttgtttggttgaccaagtcagaatgtcaccccaccctaaaggactgaaattggccggaatcagaggctgggacaacacggtccttgccaattaattaacctgcttgtgatgatagaaacctctagactccactgtgtttatgtgcataattaaggatgtttggctaccacgtttcctggtgtggcttttgcctttgaagtaccaatgagctgatacaacctttgattgcagtatgaaattttagtctgctcatttaatagtcttaaatatctttgggctgatggcttgacaaattgtgttgatgtcacagctgccctcaacagtgtcaagaattctttctaaaaccaaaggagtggtagtagattgttgaaatgagcacagcgtgatcttttaatttttttttacttgtgaaggtattcttgggtaacttgattttgaatacctgtcttatgttagatggaaggcatgcagagtgcgtttctgaggatgtggaaactcgccaggctaatatactttacttagagttgcaaaagaagcaagaagagtcccttggtttctcagtggttcagaaagtaagcctatcttgtgaacaccaaggtaaatggtttaaatgaagcacggttcctctgagctgtcgctgctgttcttctttagcccccagagctctgtggcgtgaatcttgtattttaagatgggtcttatctaaaggttaaaaagaagacatattcttcttatagtagtagctagtcagttacattcttagtggcagtttgattattttatgtgtaataaattgcagatatttgctcttacagtcttgaaaaataatcttaaaaattaactttgtggttgtgagtaaaattaagaaagtgcttccctccctctcccttcctctctgtgtatgtgtgtaacagacaggcagagggggcagagattgatagctattgggcggggactggagagagaagtcactgagatgccttcctcgtcaggagtcctatagaatccaagctttcttgggccttgaaaagaactaactctgtagaggtattagaaacgttggatgttctagagctcagatctgtatgtaagaattgcatataaatatgtaacagacatcttttacatgcttaaagtagttctgtaccaaatttgggttactagataattatatataagaaagtggaagctacccagtttcccagtttctatggagaaatgtgtagtaaacagactgtaacacatagaattagccaaatttatctctctgtattggtatcgactcagagaagaaacattaattactaaaccaatgagccaattagctagccaaccatccagccaatgaaacaaccaactaaccagatccatccatccatctatccatccatccatccatccatccatccatccatccatccggccagccaactggccatcctaccaactgttcatccaagcagtttactagccagccagccaaccagccagccagccagccagccagccagccagccaactagccaatcaactaccagccagccagtcaaccaaccaatcaactagccaaccagtcgatctgccagccagtggaattgactcttcaggttcgtcaagggctataatccaggtcagctttcataaaacagcaaacactccaaacaaagtcagactggtaacagaatgtgcaaatgctggaattaaattaaaaatctgtctttggtgaggtaattatatcttgcttcctggtgattgcaaaactagcttccctgggcagctgtaatgcctagttcctagaagtcttcgagtatatgctggaaggtgtactcctgtccagatttatcacaggaaggacagacaggtgtccagagagtagacctttatgcagtggccttttgcagatggatagtgagggttggacatcgcaggattgtgagttttgtcctgattcgtggggagaagtgtcagagtcaaccatttttggcatgggctctgtgctcctttgaaaagggcagctagaaaaggcccttccttccttcggctttcagatcaccttgccattctgagtttactcttgggtattgcagtagtcaccgtactcgtcataatgcccctcagtgttctagcttcacggggagaaaaggatttattttctcatcttcttaagtgttctatttgtcacaggtcagggagacagatggtgggattttcttcccatgaactggccaaattttgagtagtgggagagaaaaggaaagagaagaatttcctcataaaaatctgctggatcgttgaggagagcggacacttccctcaggcttgatggtgtcttccatattgacttcttcagtaacaaagagcaggaacaatcccggtgacgtcattgctctcagtcttcatgacatcagatgcatcatggcacactttggatagttccaatacataagggatgttcttctaccatggacctgcaaataggagagtaatgaagcctggagcagggtcgaagaggcaggggcttcatcaggattccactctgaggaaaatatcacccatgcgctgaaaaccaccctgatttgaacatcagcagcttgcagcgtggttactttcaagtcagaactgtaatgagggagacagaatcaaggcatggaatgtctgctggcctcggggcacgtggtgggctggttctggttgtgcaggcagtttcttggttctggagtgttaaaaaaaaattcgtttttcctttcccagcccaggtcccggagtgatgactccatgactagttagttattaattacaagcctcccacaagctttggctcattccctggctagctcgtcacttagttaacccattcaaaccaggctgtgtatgcctaccacttggttagttgcctctcctcagtcctgctctcttctttcttcgtgtcttcctcagcatctccctcagtgtctccttgaatctcccttattctgttctgactttagctccttgctggtttatgactgtctctttgcagctcttttcaggtagctctgtctccatctcaaatttccctgagttcgtctactttctggtttacttccttctcggtccctctccatgttctcttgaatctctcttttatactctttcccagaatcccctctctccctgccagtgtcccgcctcctattccctgcctcagctcattggcctttggctttgttattgacaggtgatgcttataaaagattctatactggaggctttgtaagaacacagaatggctttgaacaattccaaagtttctttctttcaaaatatttattttattatgtattcctgtgtgtgcacttgagtgtgtgtatagaggtcagaaggatgcccgtagaggaaggtggatccctggagctgcagtcacaggccctgccctggtgagctgcccaccatgggggatgggaactgaactctcccgtcctctggaacagcagcatccacttttaaccactaggccatctctactttggcaaaagtttctagtgtgaacgtttctcttttgtcatcacctcctgtgcttgtcctacttaatgacagccttgtccatcggctacccaggcacagactggttatctctgctgttctgtccggtagatgagccctgacagggcacttcagaacactttcaaagacaagcatagatttgcagcattgcaggttttggtcagtggactctgtctagcccactgttaaatgttcctggctctggctctgatatagattgttgtgagagtctcaaggaagtctcagtcctgagcgtacgaatacagtcttgctcattagtggcccatcagtatcctgtgcttgtttctgtttgataccacgttgagcctaggatgctgcgcccctgttctatggctgttcatgttgctagaattctctctgggagcaggtgtagcatggaaggaggggcagatggttagagaacctggagaatggagaggggctggattggatgtggctcacttgtcatggaaacccaagccatcatcttcactgtagccatttgctgtgggtattgaggaagactcttggatggtgcagaggctatgctaacagtggacatggtggcctgctgctgctgctaagtttgttgctctggcagagtattccttaatgctggagaagtgttctacatgggatggtagaatagggcagagaaatgggctcagcagttcacacccacgtctgcagcgtagagtttactgtcctaggcagacattatcttcacgtgttttatggggctgagaaactccacggagcttaactttcaagaagagtgcactgcagacctggaatgggaactgttgccgtctgcagtttctgtttctaatgtagaagttatgcttaccccagtgtgtgccttaggctgcttccttctctctcttcccacctctctccctaccccaacagggtttctctggatagcccaggctgtactggaactagctctgtagaccaggccgacagcctctgcctccagcctgctaggattaaggcattgagtggctttcttaaagtcatctctgtgcttttgttccagtggatagcctttgaagggcttccaggaattcagtggattagtccattcttgtcattgtcccctttgtaggccatgtctttatcattgttatgttttccttttagtgtaagtaagccaaacagttgtcactagacggcagagtgaaagtctctgtcaggtctcctgctaagtacttccacactgtccttctttaacccttctgtgtatttatttattttttggcatagttatatttaccaagtatgtggtctgtctggatcagtgttggtttggggtagcccatgccgtcctcacggccttcagggaagaaagctgatgtcatccttaccttgcagatgaggggactgagcgagcaaggttaatcagctgctccacttcacactcgtgctgcacagtagagcaggggctggccgggtccgcagccttggtcttaagtcggtgtacatttgtgattctaagaaacggagcaatactcagcaccaggagttcacttgagtatttaaagagttgataaaatcaaagaaggttccttttgacttctgaacgttagttttgtggaaagtcttttgtgacgttcagcatttggaaggttggctgtgggtctggagatgggtcagtggctaagggtgtgcactgctcatgcagatggcagcttgattcccagcacccacatcaggcagctgcagagctggtggctccagccccacagcatctgtcaccctggccttgcaggcacccacactcaggtaagcatgtgcaagtaaaaataagaagaggaggaaagaacctgcctgccgcgcactgtgctttcagaaaggaagctgcctgctgctctctgtgatctcagagcagagttgtgagagacaatccatgtaacataaaatgaaccattcaagagttcattctgacacttacagtgctatgcggctagccgtccgtcttctgtctgtcatctcaggcgctcggcacacccagctgagactcgggtgctagctgagcagccaccctccgccatgctgctggcagctgctagccacaccttccctctcttgttctgggtgtttcccatatggatcacgtcgcataggtcgccccagtacattgtgtggactgactgtgccttgtcctttcccgccctttacttccagtgagccctgtggttaatgagcgtatgtcggcgtcactggagggtgcagttgctggatgatgcggccatttgcctttctaccttgtgcagctgctaagctttcccactgtggctcctctcccactgcagaaacgacacttgagcattggcctttttatttcctgaggtaataaatatcagggcacctggctgagccttttcctgtctctgagactggggctggtccagagttctacatatgcaaagtggacacttgtgctaatagagagtgtagcccagaaggtcataggcccagagtttctcagtgttagggaaggctgttgtttgtggtggtgtggaaacctcactgttaacagtggatggtcttaaggcagcaatgcttttctctcttctgtgccatggcttgccttgctttatgtgctccagaaccatcctggcatgtctctactcttctccatccgtccatccctccatccctccatccactatctatctatctatctatctatctatctatctatctatctatctatctatctatctatctatctcatggaggtcagaggccagtttgtgggagttgtttctttctttccagcacataacttggggatcagatttagtttatcagatttgtggcaagagccatgtcacaggccccccccccacaccccccgctttgtctttttgaagaccaggctctctcagtttgtgcttggagtagagaaatcaattatttgaactaaagtgattccctgtataaacagttcacactttaagatgaatttacttgcttttagtttaacatgtgggttgaatgtgtgctatgtgatctcccaccagtcactgggaatcccaagagaacctcagaagggagactctgaaggggtgaggcaaagaatgagagaaactgagttgtgagagtgagcacaggtgtggtcctgctctcccactgagttgcctaagagggccagacactcacttggttgggtaggcaggggccctgggaggtgttagtttgcacacatgaaggtggaccctcctactgtctcctgttactatcaatacggtgttacttttggctcattagattgagaaagtattgaggtctttgaggcttgttaacacagttatcaccagatatttattggtaatgtggaggagctacaggcacccttagaggaacagacctgcacctatgcacctgagtgcaatgcgctggtgttgggtgcagttagtgactgtgccctgggagcagctactgcatgggcacatggtctaagaataggtcccattagaccctggtcttgtcagagaggcttgttctaggtctgcgtgagaagcaagctgtttcaagtttcatcagcctttaaaggtttttaggcttttcttttcttgtcttttccgttcttttttcttacagacttctgcaccggtttctgagtctcgccctccttccccatgttcccctttcatttgtatcctggtctggtgctttcctgcatcagctcagggagtaagccggggtgggggaaatcatctaaaattgatctcaataactcagttgagtaaagttaaatttattctatttatatttttaagacgagatactgtccttccacatttagaagcagcactaggttccagagtagagaaaatcccacctccacagatcagaaatgtgcgtctgttaaagttgttttcctcagaggacatttcaaaagtaacacatggcttctattgacctcattttcttccacctgagaaatgatgttgaactgggcctgcgtcagagagccatggtgcctctatgacagtcaagcagagaattcccacttaacactatgggcttcagtgctgatgagtttcgcattgggcaatgggaccctgacagaaatctaaggcagcgcccagagcgtgctgtcagtgctctccagtttgggctggcgtttaagatgaggtaaatgttgtggaaatatacaaagaaactccagtatgagggaaaacgtcctctttttggcaccaggttccctttcttcctcttgccttctctgccatttctgtcacgtaattcagccatcagtgttcatgtgagtccagctgtgtaggactcaaggctgtccgtgtgttccacaggctcagcttcctgtttgctggccttgatgatagtgtcatcacttcagatgtaggcaccggctgcagcccagctccaagccccttgagtgtggtggggccagtcagttggacagaggagaacgtttctcatggtcatggtgagcatctctttgttctttgaggatctgaaagctgctgtctgtacttcggaatccagaactaatacagcctatggcagcagggacaaactcaattaacttagtttcttgtggtatatcagcaagtggagtggacttctcctgggccactcgaccagtgggttcacggacggtgctggcatcctgtgtgtctgtgagtaggtggcatccaagtcctttcttagttttttaagtcctttgtccactgagagccatgcatgggttttgtgtgtcccttttttggggggcacacccctggagaagcttctttgaaaggcgtggtggtggtggggatcagtgtccccagtgtccccagtatcagagggtcaggtggctttgcttgagcacatagatgtggaggttggcaataatctaccctgaagcctctatctccccgtctgtgtgtcccgcagggcgtctgtggaggtgtccaggccttcgtcctttgtatgttgccttcctttttccttctctggagacttcagatgtgttgaattgaaatttgtcttttcccgcttgtttttctagactcatctaatgttaaccgtgtgtgtgtgtgtgtgtgtgtgtgtgtgtgtgtgtgtgtgtgtggttggcaggtgagtgggtattttctttgctaatgtcacatcatagtttcctttgtgacccttggaagttttattggttaaccctgggttaattaactccttactttcacattatcccccactcgtcacctgtttatctttccccctatttcttggcaggtattgttaatctcccctccgtcctgttaggggctgtatttacttttttctttttcacagtttcactatgtatagacttgtttttcttcacaaacttttctgatatcatcatttcaggaagacagcagttcatctgcctttacacagctttagaaaccggtgactgtaaggttctactttcaaagagaaagttctgtgtccttggttgaccagttgccctggtggactagatgacggagtgggagttgagccattttctttgaggcccctcttgtgttgtctgcatgcttctcccactaaggtatccattgctctcagagaggggggtctgctgtgtccctccccgccacactgtttccatggctcctctcctgctggccctccagatggcagtcctcctctgcctgaggtgaggacagggaagggggctctgtgttcctcattgcaggtctttctgtccagctcccaccaccctgattcctgagtctttggggtttcgtgctttaattagcttgcttcttatcctctcacctagaacaaattaaaacattaattatcgcttgtctctctgcttttctccttccaaaaattctttgacctcttgcctgctgctaccccagctcatgttttctctgccctcacagatttagacttttaccttttcattgttccttccgtgggggtccatacatagttataaacaggagccttgatctgtttatggaaacctgtagagacatttttagtaagagcttctcttacaaactgttgtctacatgtttgggtttcagtgtgccacctggtaacactctggctccagaagtgtgtgcattaagaccagaggggacttcaggagataagtatctgcggggtcgattgttggcagggccctggcctgaggagctgtgtgaggtggggctgtctctgtgtagattagccaggagaaagttcgtggtactgaggcagtgctttcagagtgattgctccctcgggtgtgcagggtagggctgggaggacagcctctaggccagtgggttctctgcccatccacaggaggccaggctagggttgctgagtgcctgtgaggggggctgctgtgagggatggtgggaagggacagttttaaggtgaactgggacaagggttagcagagcagcaccacaggaaggcaagggccacaggctgggcccagaggatactctctgtggtgggagtagaccctcagggctgcagctctgcctgctgcctgctgatgctctccctgatgctggaagctgcaggctccttgattgaagccctgccttgctggtctccacctactcctattggaagataatcatgttttcataattgatactaacaatctaacagatatggctagcctcactcctcagagaaagacagaatggcatgtatcacaggcaaaaggtttttttttttttttttttttactaaagtttgtgtttaatgcaatttttagcaatagagaacagaatggaaaaagaaccttctgattcatacttattaagcaacccagaaaataagttaactgtagtagggcaatcaggaattttatctacaggcacagcttcatagtatctgtatgtgtggcccagtgccaagaccagtgtgaaactaaaaacaacaacagcaaactgttagagcaattataacaagtcaactttgtatccttctgtgtcaggaatgaaaaataaagagtccagcttccccggcctgccggcctgccggccagtatttagcattcctgctgctgtttacagagctttgcatatggtctttgaaaccctgcgtgctctttcagcgtgaaccatctactcactcttatcagctttcaagatgctgtctctcacagctctgccactgttagagcaggtccggaatcaagcagggagctgggaaagagctccgctgcagagctcggctgcagaccgccatcctggctggaggttgctaagcttctgtgtacattcctggtgccctcctggtggcctgatccttaggcctccttaagttaaaaatactgggtgtgtgtggtcttggcagctggcacgaggccaggctttttatatcctgctctggcctgggaatggagctcagcagagggggtgcacagtgtggggaggccctgctgcctggctgttctggttttgttgttctaaggaagagacagctgatgctggccctccacgcgcatctttcttttggtctgatgtttgttagagtagccatagagagccaactttagagtttaatttcctttcccctttgaagcctgttataccatctgttagagagaaacttctatgcctaactacttatactttaactaattaattgggcactgggttcctggacatatttattaaatgtcaacaacttgggacatttagtctttgtttttagagttttatgtccagtaggatttttcttaaactatgtccagaatatcctcgggagtgtgcacactgctttacattttttgttatgaattattgattagattgttctgaaggtatccatttgtttcttcctccccacagcagcacctaggaagctgttttctgtctccctccctcttctgggtgctgttttacatactagcatgccagggctaaaggaggcaaggcagactcatcgcctgcttgtgctattagacatccgtacagtgaggaacagtgctgtggagtcttcattgtgaatgctgttcaggctgttccctgcagtatgtgggtcaatgggtggcccagttcaagacctggggcacttcagaagaagtgaggtgtctgcccctggagaggtgtcttctgggagaggcaagcatccatgtgtgtcttgtggggagggagtggctaaagcgcttatggcgtatgattgataagccgattgtcacagtcgggtggaccccaaggaagggacaagcatgtcattggccctgacagtgattgacaaggggaggcaattcacgtgctttctcagatgaagatgcactaaagcgttcttttgcactgttcttcccaaggcctcacggccacatgccttgtgacattcttgggatgtttttacacaaagtgaggtcctttgcaattttaagtattctttacatttaatttatgtttgtgtgtgtcctgagtgtggtgcaggcatgtcagtgtgtgggcacatggaggcctctgttggccttgttgccttgagacagggtctgtcagcaaacaggtgcacattactttctctaggctgcctggccaccaaatctctaggatcttccagtctctgcccccagtgctggggtcacaggtgagcagagctgtttctcacttttcttgtagatgctggggatttgaacttgggtctttatgttggccatagcaggtagtcacctcctggaattgaagactattttctggcagactttaatgggtagccctggctatggccctgcatggcagactcgagcttgccccacttcttagcccatgcgggaaagatcctgctcgttcgttctgaagttggcccagtgcacagaatcagctctcactaggagcacttacttgcttccttctttggaaatggaaactgttgggcagaggggtggacatggcgagggtgtttgagcacactatagcagaccgttttggcctggccaatgtgaatcgatgtgtttttattagagctctttggctgatcttggactgtagcattctcacgttggactgaacgttaacaaaatatggatgcttttcttccttgggatcggctgctaaatgtaaggggctttgtggatcagtgctgcgatctcttcatttgtagggtgggagtccactaagatgggaacttatgtggaggggtttgctgaggttctgagtcagagccctttggaaggcatgttggaataggccatgtaggtggggagagcctcgaactctacctttgctggggatggaggacacttgtgctcttttctctccttatctccccgcccacccgttttaaagtaattctgtaaaatatataagaatgtaactgcttaatgcaaaagtaagaccccatttttcagagataaagtaagtgtgtgtgtgtatgtatgtgtgtagccgtgaataacacagcacagtgctgtgcccctgtgctgtggtttcctccctggctagtgcacctgtgtgtttgctgtgtgctcctctctcccattttgtgtaggctgcacggcaggcctttgtgtggattgctgtgttcaggccagcatgaggggactgatttcactgctgctacaggaggtggtggaggagagctggcagctttaaggatcacgagctcttcctttaagggaatttcctagaagtgaaaagaggccacctagcccatgatcagaaaacaatcaaagcagaagaatggagcatccgccctcctgttgcttttaaaaagtgttctttcctgggtcacaggaaagtgccactggcagcaagtgacctcacttgggggcttcctgggactgcttagcttgggagtggaatatcttgtgtggtctcctgttttccatttggcctttgatctgtctgccttcactcagaaagtttaaaatttacctgtattttgtaatacccaattcatagactataaacatagcctgtgtgttctgagcatgttttctctgttttgtaatctgtgctgttgactgtaaatcttaagacactccttagaggttattctttgcctgcttttggatctgtagtgaaaattaaaggtactttaaagtccagaaagtggatgatgtccactggtcagtaattagtgaactcggtaaagggcagctgctcagagaagtaggagagtctgtggtggctgggcatgtaccagggcagctgtgaagtaacgtggcaggtggctagtgagaattctgtcgttctccttacagtacatctaaaagctcaataactgttgggtgggagtagatgagtgttgagcatttgtggagagtgtacatggtccagagctctatcaccagcatgtaaaaaccaaagcaaaagtcaggcatgctggtgcacacctctgatcctggcactcaggaggcacaggcaggcttatctctgagttcaaggccagcctggtctacaaagtgagttccaatacagccagggctacacagagaaaccatcttcaaaaacaagagccaccaccaccaaaagccaaagcaaaataaaaaagaatataaatgtactagcatgaagcagcttccgttgtgattggagtaagtgcagagctaggatgcactgcacgggaggcttcaggctggcgtggaaggacttagcagcctgtgtctgtttcataatctttttccagtggaaacttaacatttaccaggatgaccttttaaaagtcacggcctgcctcattcatcgtccctctttgaaaccatgtttactctaaaagttgaaaggacattgtcttaagtttttctttccataggacatgtgctggtttgttgtttttttctgtaaaatgcctatataatataagagagtaacaaagcacaaaggctcttctgtaacctcccattggttagccactgaacaaagcttcagaactttgctcatgaacaggactgggctttgccttatgggtgtctgtgtgttcatagtgcacagtgccatgttagaataggctccggcaccctgcgctgttcagtaaaacatctatgaggcaaagaaaccaataaagagaagaatcagtccctcaggggtctgtgtgtacaagtctcgtggtgctggggctgtttgtggtactcgtgaggctgagctctggaatctcgaactgactctgaggacagagaaagaaacctgtggttatttatacagggtccacgtgctccttgtattcaagcctctagctgctcttggcttctgacacaactctctttaattgtgtatttgggaaattacaacaaaaaccaacattttaaaagaagaacttccctccgatggcgaatcagactggtcgcggctctggatcagatttttaagggctccctttggagctgtccagttattttgctatttcagactggcttgcctgtgacattgtagctcttaagataatttagagctgtaggacgttgagtgggtttgaaccatgctgtataatgtaatatggaattttgtaacactgttaaaattctttcctttgcattcagatgactaagtacagtcaacggcgttggcaccgttaccttctgtaggtatttactggctgagtctttctctatagaaagcagagatcatggagaagccagtgcatgccagagctgatttgcttcttaaaagattccaggcctgaagatgaccagctagacagcctttagcagaacggcctggttctggtggagaatgggcccctgtggatggtgtttggcttgcagtggccttggaggctctggtgtgattatctcgatgcgaggcggtgtagaaaacaggtagtttcagtttcgtaaatctgtgttttcaagcagatagggactttgaatcagagtgctgtgttcaaatcacggaagccttcctgactcttgtctctgctttcaaggccgttttaactcaaaagtgattgagagccagaaaatttgacctccattaacacgcacggcgttgtcataagcacaatccttctgtgactacacctttatcccaaccagagggtgtgatttccctccccctgatcccgacctttaccagcagtatatatttttctgcagctgaccacaaggaaacatgtcgggactaactcaggataacttggaagattaaattatgatttaattagaacattctactctggccctgttaataaccaatggcttgtattctaatttcctgtgtccctgagctatgctattttagatcttgagcttattcaaggctgtacctagataacttttttctttttaatactcagggtttctttcccactcatttatgttagagaggaagaggtgtttatcgaacaagtagttttgagaggagacccaaagccttggtgagctgtggtgaggaacagcaggaagctgctgaagcccacagttgagcttccacttcggccttctgtggtgcaagtgtggatgtatctgactgttgatcggcgagcacacttggggttcccggtctcatgtatgacacattaccttgtgccatgcccttttgaaccttcagacataactatacctcagagacagagtctgcaagatgagctggagagcagtgattgcctcagtaggttctgtagagggttaaatgagatgttacctgtgagtaatgttagaactcatggaaaaactagattttgtgtttgtaagcgataaatatttttacaaaatccaactgtactttagttgtgaattgtggtgttaacagtgtgtgtggcaaaccaaagctagctggctcatgctcggtttccttcttcctctttaggctgggcacagcacacagcacagtgctgggcaaaatgggctgggaacagggtttagtttctctctctctctctctctctctctctctcgacttgtacatgaggatttctttttgaattaagaaaattaagactctattgaggcaccttaagaagtgttgggtgctatgggaggcaggtgggagtcggaacatgggatccctgcctgtttctattcttgcaggccccaggtctcctaggcttactggatttcttctcacaaagcacgcgacttcagtcccccaccctccagcattatctcaggactgctcactgatgcctgaaggcctgttgagatgagcgagtgaggccagcccatttggatcctggcagtccagttgcagaggactatctgcctctggatatcagctagcatgccactacaacccattggttgtgtctggatatatagggtatagtagagacagtaagtgcttagagaagttttattatatggagagttcctttgtaaagtgttgaagcatattcatggctgttatcaccgtaaattactctaagcagcgtgcccatcagaataagtgaccagacatattaggctgcaacatggatgagctcttatggttgtgttatcttgttaaatttccataagtttctagaaaattttgtctgtattcattatatgtctgtggtaagttcagggtgaatatttttatataatgctgtatgttctgttaaaggcccaacctaagttacgataatgtcatggtggtgtgtaagttaacatgaagaaacaaaaaggtacatttcaaattgtgaattgtgttttctttcataagaaaacgttctagtattgccttaatgagtggattgtttttgatttttttcaaaagcttgaggtggtcaaggatgtgcaggatgggcatcagctccagaactgctgctctgtgtaagcagatgcaggctcaggactccagggggcgggtgtgccatggagaatggacagggctagggctgtgcgaggagttcagtgggacctgttctcgtttatgtcttctccatgatagaggggggtgtgtccactttattgttagcttgcttaggttttgcaaaattccgtattttagggcagagtttccgatataagttatataaaagaatcatattcttaaggtaaaaggttaataacaagccgagacttttgctaactgtatgaagagtggttaaagtagtgacaggttgctcttctcagactgcctcagggacgtgaatgaaccccaacttcaacataaatatttacccgcctaagatcacagatagagaggagaacattgacttgcatcccaggagtgagctgtggagtagaggatctagctggctgtctgcttttgatggcagagtagggtgacagattgagttctgtaagtgcctgctgttgacatatgtcatagcaattgcagtgctcacatggcctggctgtgggttcttgggcaatgagctctggaggtggtctggtccccaggttgctgtagggttatggtgtggcccgtgtgctgctgtcttagaacagcacgcacatgtatgatttgcgcactcgtagcataccagccattcctccattccatgtgcctgtgagcaaacacaactccactgatgcctgagcctgctcacaccgtgtctgtgacaaccatactgcctgcagttttcagttccatgggtgagcgcaatcacccccctcatagccataatgaccacagttatgtgcagcaactcattccgcttcctagcagttcagtgagccatgtgtcgctgttatctccctttacagatagataatgggacaagagatggaatagcttcccaagcatacctgaccccacttagcatggctgcaggccctgttacctcaccacagtcctctgcctgtccagcatccagtgttccttcctggtctcataggagcacgtatctgtctcattgcttttatgatgcatgtttgcagtatgtgtgccattacctgtttattgtattgtgttaatgcacaaaaagctgggtggtgtcagtgggagtggatagtggaactcattgcccttactgatcagtcttattttgttaaacaaaatgtaaggggggatctacaagagaaatggccgatgcagcttgactagcaagcggcagagggcgtagtgtctgaggttgggataagtgggatacccctcattccctccaagatctgggtctacagagcctgtgactgtgtgtcacacagccctgtggcacctgtgattgagggacactttcactgtgtgacctgagcttgagtgaagtatcactgcgcacagcatcagctcagtaaagattttgtgctttctgtgctttaagtcagtaatctaagttgaaccttctagaaagaaagccctgtttgggtattgggagcgccaccattttctagatgtggaaactgaggcttggactaaggggaattcagctttctggtgacacatcaatgctctcctgtggattttgagaatgtcagggcctggttcctcacgattgatctcagacaccaggcatgggcttcccggggaggtaggacaagggtccagcggctagacacagaagctctggtatgttcaagaccacgcttgtagcatggggttccctggagccatcttccccagaaacatcagccgatcccactgctaatgcagccttctccttcccctccatcagaaggggtctcgtgtgtcccaggctggcctcaaactcacgctgtggccaaggatgactttgaagtggtatcccaggcaagctctgcagtttctggttggagctcccaggctaaccacgggatggaggctgtttctgaagtttctgtttgaattgaaacttctctatggagctggatggaaggctctggccccttcttgaagctgctactgctcttctggtgtgcgcagagatgaaggggcacggtgccctcaatcgcagcctggtagtagctagtgctcctttgaggtggaagggagccacatgtctggtgttttcccgtctgttatcctgtaagcttttgctttaggtggtgtgtgatactctgttgaatgccctgggcacagcctccccttcttgtttgtagggatgcaggagtcagagcggagagaaggctgcttcccgtatgttagcatccctcttcagtgacttgcagaaggcgagtaagaggttttggttctctttgtgaatgttccagtgttcactggcattctgtagtgtaaatgtgcaaagggaactgttaaaaatgtcattattttataattcacagcagcatttgctatgcagcaatgcttaccagcagcttctctgtgttaaacgaaactaaagcatttccagatcaaacctgtaggctgcaaagcatgtgattccttcccagccagtcacatgtgcctgaagttagcatttgctccctgcagtttggagagggcagaacgctgaggtggaaagctgccactgccatgtttcattcagacccccacactcttgtctgctcacacaaccacaggagggttgttcagccatttggtctccaagggaaacaaggacgggcaggagggaaggagggaatccacagaggagcatgaagacagcacctacatttatgtatgggttttccgaagcagcatgggccttctgaaactcttagctctgcgcagatttcattttctaaagttgttgcgatatagattaatgatttgttagttctttccagttttatctggtgttcagaacttatcgcatgtaatgttggaaggactctggatcccttgcagaattaattttttaaaaggacttatttatttattatatgagtacactgtagctgtcttcagacaccccagaagagggcatccgatctcattacagatggttgtgagccaccatgtggttgctgggatttgaactcaggacctctggaagaatagtcagtgctcttatccgctgagccatctctgcaggccccagaattaattttttaacgttgtattttttgagctttaaacattgatctgttttgattttggtggagacgaatggccacagtaggatttggatgtgacatatggtgtatggtgcatggtgggagcctgctagtgtgacctgccggtaatttccaatagtcagaaacgagagactgtttgaaggtagaacttctgccaatggaaaggtagaggcatcaagacagagaaaggctcactacagccctcaggatgagtctgattttcctgctcactgcttatctaacaggcaccacaccaagctgcagagtgctgagcctttcattgtgttggggttgttatagagaagaaaggggtctgagtgttcagtctgcaaagtcctccttctctctatgcactggttctcaggaccattcaccagtgtttagttaagacgtagatgattggcaaccgaggagaatgttccagacttttagaggatcttataaacagaagtctttttttcctggcacttcatttccagcctgaggaagtagatctttctggaaacagcttttgatctcttaaagtaccctgttttgtgccagttacttgcatcctatacagctagtatccacaacctaacaaaaactcagagaagccaggtcaagagaaccatgctgcggccagggcatccattgagggataccctgctgccacagaaggctgagtggtcaggccctgggaacggtgggacgagtctgctttccattgctgtaggaagtatttaaaagagggaaaggcacacggtggcttacagcttggctagttctagtcatgaaggattggcttattgttttagggctgtggcaaggcagtgcacaacatgggccacatagtccaggaagacactcacgtcacggtagccaggaatcaaagaggagtatgtgtatgtgtgtgtgtgtgtgtgtatctttgtgtgttcatgtgtataagtcaccaactcacagcagtagatgacagataaacaggactctgtctctctctctgtgtgtctctctgtgtctctctgtctctctctctgtctctctctgtatgcatttaagaggcaggcattatccttctagtggacatggtctgcacattattttgtagccgtttatgcatgtgttttgttgatgaagaatcccatggagactatggtgtgggtttggattaggaaagtctggagataatgtatgtaaatgctaatgtctttagactgtttctgaaggatcctcatgttgtcctgtctaagaagacacccttgacacactttccgattctgtctgtctgtctgtctgtctgtctgtgtatatgttatgtgcatgtttgtgtttgtatgggcatgagtgggctacagtgtgtgtgtgagggttaactgggagttaattctctccctctactatgtgggtcttgggctgaaactcaggttggtggttggtgggtttagtatttgctgctgctcctgtccgtcatgtcagcctgagttcaggtctgttgtgcggcaccagttatttttagagcacttgaggactccatctgggaagtgaggccctcagagctagaaccttaggggaagaaggtaggtcttggtggcagttctgtggggcatgagtcactgaagaataatccacagtaatcctgttcgttctgtattctaaaggactgcagtttcttaacagagcttcttcaaagcgttcacactagataggacgtgggtttggtttggtttttggtgttttttttaatgatgcagtgtttgtgtgtggtgtgtgtgtgtgtgtgtgtgtgtgtgtgtgtgtgtgattggtgtgtgtgtgattggtatgcgtgtggtatgtgtatatatgtgtatggtgtgtgtgtgtggtgtatggggtgtgtgtatactatatgtgtgtggtaatatgtgtgataagtgtgtggtgtgtgtatatggtatgtgtatatatgtgtatggtgtgtgtatatgtgtgtggtaatttatatatatatatgtatcctgtggtaatatgtgtgttgtgtatgctatgtgtatatgattgtggggggagtatgtagtgagtgtgaggtgtgtatgtgtatggtatatatatatatgatggtatgtggttgtgtgtgtttatgcgtctctatctgtatctcaagaagtcttttagcgtggtaacctcagagccttggtagaatccactgtaaaactgcaggtcgggtctggaggaggagggatgccaagccctgtggggtcttagtagcctgctatctgtgtttctttaaattgttctttaagtaactagaggactattcgatactcacaggtgatttgttttatttattttttttcatcttcaagtgagaatgaaaaattatggctaaataagacagtcagtcactgaaaatggcttataaaccagcagatctctctcatagcagccttctttgctttaagtaattggataggcttgcaaggtacagtgggaattgtagtttccaacttctttgtattctgaaaatgagtaattcctcaggcctctgaggtagaaaaggagagtatgtgctctgataaattgttatcttgtttttcaggcgcatgctttgagcagcacaaagccgccagtcttcagtgtctcccaggggctctgagcttggtcttaagtgatggtagcttataaagcatggcgctgtgctactttgactttgaccctagctttcctctcctgcagcaatccagaatctgttttatcataattttgaaaagtttttatttataccaaggtgatttgtgaaaatggtaagtgaggttgatggttctgtagtgctggctagtttatgtcagcttgaccccagtcagtggagcagagggagcctgtagagaatgtctccattttctcctatagactggcctttatgatagttctttatttagtgattaatggtgacggttgcagtgcattgtgggtgggcccatgcctggactggtggtcctgggttctataagagagcaagctgagcaagccagtgaaagcaagccagtaaggaacatccctccagggcctctgcatcagctggtgcctcccagatccctgccctttgtgagttcctgtcctgacttcctttagtgattgatgaacagcaatgccgaaggccaaataaaccttttgctccccaacttgcttttttgtcagtgtttcatctcagctaaagaaaccctaagcaggacatgagctgtggccatcagagatcgtaatcactgtcctccctcctttggcccctcccctgtacgagccctttcaacctctcgctgagtcttctggtaagtcttccatctttgaggtacaccttgttctgttaccttcagcttacatgctgtgtcttgcttttccctctgggtgaaagccgcttagcattgctttccacttgaggccttgctcttctggttctctccgcacacactgatgctaagttggaattgaccgcggctgtgtttccgatgttcagactgggtaaaagaagcagaaacaagcaatagcttattattattagcttacccacattgtctttggttttcagcagagagtggctggcctgcattccctttgcagagtgtactgccctacagtgtgctgtgctgtactttgggtctgctgggtcagctgtcatttatgttccacaggtctctcttcttgctctttgtggcttatccttggattgacatttgctgtcatctcttgaactgggctgggtcctttgtagctgttctgtgtccttaggaccatcttctagtgggtccctcagaaatggaacagagaagtaaatccaaggtcttgcgtgttggagaattatctttattttaccttcatatgcaaattacagaatgactgagaagagaattttggaagtcacattccatgaacatgtgtgtgtatacatgtgtgtacatatatgtgcatatacttacatatatgtgcacatttatacacacgttattctgaagccaattgatgcacacctacatacacacacatatgattacatttttagatacaggaattcactatctagccactgctgacctggaacatgctttgtagcaggattagatttgtctctgccacccaagggctggcattaaaggtgtgtaccaccatgccagcattcggaagtggtcctcaccatctctactggctagttttgtatcaacttgacacagctggagttatcacagagaaaggagcttcagttgaggaaatgcctccatgagatccaactgtaaggcattttctcaattagtgatcaagggggaaaggccccttgtgggtggtgccatctctgggctggtagtcttggttctgtaagagagcaggctgagcaagccagaagaagcaagccagtaaagaacatccctctatggcctctgcatcagctcctgcttcctgacctgcttgagttccagtcctgacttccttggtgatgaacagcaatgtggaagtgtaagctgaataaaccctttcctccccaacttgcttcttggtcatgatgtttgtgcaggaatagaaaccctgactaagacaccatcttaaccacttatgttgtcctgggatctgaagccatttctggttttgctcctaaactttgctatttctctgtgcctccccacccccacaatggtgtagcttctgacttcctggtgtccttgagctccatctcagcctggccgcttctttggccatgcaccctgactctgagtcacacaaacaccctgggactctttcatctccaacgttatctctacccttcattattccatgttttgtagtctcttcccttactgttcttgttaggatgtcgactcagtgtgctccgtggggccctagtgagcaccagcacccctcagcctcagcctgctgtgtagctgttgcttctggtttggggcttagggctatttctcttctgtttttctttttttttttttttttttttccctcttggttaccctttgtagatgactcccagttccagcattatatatttaatttacaaaagctctttttcatctcctcaaaccttccctttcttatccttaatttctttgttgttttgtttgttttaatacaatcctgttcttatttcagaaaaccatttttctctgaaacataattgactgtgctctgttttacacagtttcattttcttctattatgtctctttttaggttttttttttttgttttgttttgttttttaaattctattttatgttaggtactttcttaaactaccaagaaatctcaggttgtctgagtttctgaggagagattgggttgctgggcattggttgccgattgtgtggagaggggatggaagttggtccctcctaagtttgcatttatatctatctgttctgttggtttggcctggtgttaacccaggcagaggatgctggcatgctcttaacagagaggatcttagcatccagctgctgctgctggtgggttccagcagtgcttctggggcctccgcttagccatcttacaggagtaagactggcttcttccaggatgagggaggacaagctgaacttcatgggagaggatcttcttggtcgttgcttcttcctcccatgtttaggctgtagatccctttcgcagcccctcgcatctgtgcccgccagctgccgctctgcccttgcctgtatccagggccatcaaattcctgtgccctgccagcctttctggtccactgcatgtaagcagctcaggtagtcactgtctgtccgtctgtttatggcttccacattttgctgcagttgttcctgtactcaggagtttgttagaagagcagacagagcgggcaaccagaagcaagcagtattgccattttgtttaggagggaatgactctagatgtgagcttgaacctgctaccttcctgcagatgtctctgtaggttataaatgtggaagtcagaaaggtagaagtttggcttcttctgtaccttcaggtctgcttggggttttctcctgctccgtacagacttttttaacttctgtgaatatgtacacaattgtgggtgacaatctgtccaataaacagaatttttacagacattaaatataatcaacagcctcaaagagtcatgtatattctgttttttgttgttgttgttttttgcctccccccccnnnnnnnnnnnnnnnnnnnnnnnnnnnnnnnnnnnnnnnnnnnnnnnnnnnnnnnnnnnnnnnnnnnnnnnnnnnnnnnnnnnnnnnnnnnnnnnnnnnnnnnnnnnnnnnnnnnnnnnnnnnnnnnnnnnnnnnnnnnnnnnnnnnnnnnnnnnnnnnnnnnnnnnnnnnnnnnnnnnnnnnnnnnnnnnnnnnnnnnnnnnnnnnnnnnnnnnnnnnnnnnnnnnnnnnnnnnnnnnnnnnnnnnnnnnnnnnnnnnnnnnnnnnnnnnnnnnnnnnnnnnnnnnnnnnnnnnnnnnnnnnnnnnnnnnnnnnnnnnnnnnnnnnnnnnnnnnnnnnnnnnnnnnnnnnnnnnnnnnnnnnnnnnnnnnnnnnnnnnnnnnnnnnnnnnnnnnnnnnnnnnnnnnnnnnnnnnnnnnnnnnnnnnnnnnnnnnnnnnnnnnnnnnnnnnnnnnnnnnnnnnnnnnnnnnnnnnnnnnnnnnnnnnnnnnnnnnnnnnnnnnnnnnnnnnnnnnnnnnnnnnnnnnnnnnnnnnnnnnnnnnnnnnnnnnnnnnnnnnnnnnnnnnnnnnnnnnnnnnnnnnnnnnnnnnnnnnnnnnnnnnnnnnnnnnnnnnnnnnnnnnnnnnnnnnnnnnnnnnnnnnnnnnnnnnnnnnnnnnnnnnnnnnnnnnnnnnnnnnnnnnnnnnnnnnnnnnnnnnnnnnnnnnnnnnnnnnnnnnnnnnnnnnnnnnnnnnnnnnnnnnnnnnnnnnnnnnnnnnnnnnnnnnnnnnnnnnnnnnnnnnnntgtgtgatttcctaaccagctgcatcagaaagtacttgagtagtacccaagtagggtcatgatcagaaagacatgtgatcttttttccactttgtttgtatgtggaaatcattgcagatggagcggctggtaacccacagacatttattctttcaatgtggtagtccaagaccaatgtgctgccaggacctgtttcctgatgcgtggcccctgctttctgcatgtgcacctggaagacagggggccacctgggtctgaagtctcatgtaaaaggtctctccttaaagctgactatctaattactccccaaagggtgagctcctgccacctcactgtggccacgaggggtagattgccagtgtaagcattgtggagggatacttaagacaaaacttaatagtgaattagttatttttgtacaaagccacccagaactatatatgatagctctttagatatttaaaaagctgggcttagtgtcacacacctttcatcccagcactcagaagccagagagataggtgcatctctgtgagtttgaggccatcctgggctacatagtgttccagggctgcttgagctacataggactgtgtctctgaggggtatgaggagattaaaagaaaagatttaaagatgaattttggttatagttttaatgattcttgtggtattttctattatatcagtgtggaataggaagattttaaagaattcagctacattgttctaaaaaggtgtcagtctcagaatagcaatcatggtgatacacatttttaaggaagtcatagcttgtaaaaattactcattgaaaagtcttccttaaaatatctgtttccattcaggatgctcatttcttttaaattgacattcattgtaggaaatatttgtatgttttaaaaatgagtttaaagacttgcaactttgtgtcaaaggccatattctcatagtaactttagaaaatttccttaatgatacttcctgtacaaccaagaaataaaacaaaacacaaacaaacaacaagccccaaatgttgcccgacattcgcaggccttgctcaggaagagggccactcttcttttgttgcttcaggctctgcctgtcagaagggaggaataattatggtttttttttctttcttttttagattaatttgtacatttatgtacattaaagtgctcagtgtaatttactatatttgccttataaatattggcagaattccatccttaatgagtttgtaggtcagtaatccaaataaacctaatttactgaaaacagtgagctaagggcctctatagttcatattgatctggctgtctgaggggttggctggacatggggaccgtgtctactctgcttttctcactaatatcagacttgacggtatgtgagcagaagtccaccaagaattaatgacagataggatatgaagagatacatttgtcaaaagtgaactttaaaatggattccttaatagagagtcttagaaacaaaacaaaaataaatgtgacattatcttgtgggaaaaattagttctgagaaagttgtagagtctcatttagcaactttagacacctgttgaaaatattttaagaatatcacttctataacatttccgtgtttcttgttataaaacataacaactgacagctatgactattactagctctgttgtgaatggtgcagtaagctgtgaggctggagcagggccagccatggataaggatgcccatgcccgtcgttcccagagggtcaccatccctgtgggagtgttacccatgcttgctctcgtctacctaggcaattctagatctaactcctggattatggtgtccttgaagaaggacagctggtggctagaatgcccctactggcctggaccccattctctcatgtgacagcagacaaatctggggagagctttgtgcattttggagaacaccatccttcctgcttgtgccagcagtgcccttttgtagtgctgcgaagctcagagccctactttgggcttgagggctgaggcagggttcgggcacagcttcctgtgagatggctgtgtatggcagacccagcctaacgcggaatgcaaagcaccctggctccagaggctgagcatacctgaatatacccttactctagggcttggggtagcagatatagtagcacattaattaactgaggtaaagctcagtctctgtctttgatctcgatagcttacatttttcttgtgctttctagctttatttataagagcttgtttgaactaagtcttgtcaaagatcaatctgtgtggtattttagaatccatggaacatgaattctcaatctgccaggaaaatagaaagcccttgaaaatcatatttaacatggggcatacatcacatggataggtgtataagaattgtgctgtgtttgaacataatctgtatgctaattttttaaagtattatgttggactctggagcaaatcagaaatagtaggttttactaaatctcattctcttgtagccatccttagtaatgattctccttcccctgactggcaattttctttatgttttatagttgagatttccattcttgtattttaatatgtggaacctttgggtttctaatacactagaaatgcctttatagtttatctcaataaatttgatgactagaaagtaagtgagccctctacccttttgataatctgcaagaagaaagacgacttgctaacagagatgtaccagcagggctgaatctaataactttcctggcttcgtgtttattgtgtacaaaggtggtgacattttgcaggtcaggaataccatagcttattttcatgtcttgttctttgcaatacctagctagcccggtgccagacaggccataggtggcggattagagaagggcttgctaagggaacacacggagcaaccccccagcaaacgccacagagggttctgtttacctctgtcgcgggcagggtggaaagcagtctcgcacagtgcttttgaatgttataaccataataacaaggttccccttttttctctgtccttagttttagaaggtactgagactgagtaaacaaccctctggatgtccaccgtgattttctgatgtctgtgatcctgaagtgtgtggtggtaggaaggagtgctggggtagactctggacttcagccttggcccctcagatctgtgtcctttttgttgagcagagcatgaatgttaaatatgttaaagcaagccgctgggacctggtgtttggtacatcatcacatcctgtctccccatcttccttgtcatcctttttcaattctcactgctcagttttaggcattgattttcagtctgtattgtttagtgacttggtagacattcatcagtcatttccctccttcaggtccgactagggcagagagaggcatgaggtttaagcacagtgctgagggataaagctgctttatcccctcgcgcttcagcctggggacactgatgtcacccgatggtcacatgcagcttttaccagggattgcctcatgcagcctgagctggcaggcctcctggctccaggcctgtgcatgaagcctttctctcctcttcttcctctcacccaccattcttcccaagacaccatgtaggctgagcctgtgtgtgccatgttgggcaggctgttcttaccgacttggaagctttaactgggagcagggagcttgcctttccctttaccctggtaccttgaaaagtgtctttcataggatggtgctattgggtatgggctctgtgggtcaagcacaaatcaaacaaaatattaatacacttttgtttgttatattaaaagcagacagtggtctgacagaaagtctgcgtatgaatactgcattgaattccacgtacatgatgtacagaccaatgaaaaatgttaaattttcaggtttgattgtttcttccaaaagagattttatagtactagtagtaagaacaataacaacaacaagtccttagaattcagttaattttttttctgtatatattcaaatttcagcatttagtggtgttgaacagaagatgggaaacattgaaatgtgccaggaggccaggtcatgcacaaattttgatttccatacgaagctaattgtagcttaaagactgcactgccattgagtgggctccgctgtcactacagtgtacaggaaggaatccttcgacgtaggatattgatgctttgtgaaatcaaagtaggccaaagggagatgaactaatgctagtctctactacattctaaacatgtggaggagacgttaggatttctataaaaatcactgtgagagttagtgacctatgaccaccggcagggcccagagctaagggacaatgaggctgagcatgggaggatatgcgatggagcatgggaggatatgcggtgggaggatatgcgatggagcatgggaggatatgggatgcagatgctgtgatttggtgtggtctgtgtctttgtggtctgcttgcgctttagagctgtggcacacaatgaattgtctgccacttggtatgttcaggactttgatctgaggcgccttctctactgaaaggagagcctgggttctgggtctctggatgcctctgggggtccgggttccttagttccacctgtctcccagcctcaggcctgcactatggaaccctgtgtagttttgtagattaaaaatacagggacaggctgctggtaacttgttctagtgtgacaactcatgcaagaacctcttctgtgtggcagagcaccaccctgctgtcctggactctgacatcaccttataagggacccttgacctctacattttgcctctgtttgtgacttgatatccctcatctctttcttgtctttttgatgaaactttgactacttcacaaagctcagctgcattctgctttgtagtcctagtctctttccagaaggtctgcagtatcatgttgtgttgcatgctgggaagggaaacatgcatcttaaagtaaaacagcttgtctgtgctgatagccaaatactctctttcaaaaatcacttattctttaattatgcacctgtgtgcacttgagcgtaggtgtaggtgccctccaagtcctgaggcatccgattccttggagctggagttacaaatccttgcaagctacctcgagtgagtgccgggaactgaagttgggctttctgcataagcagttcacactcctcactgccaagtcatctctctagccccactcttggtgctagagtttatctctcttaaaagactaccttgcagtcccttactaagtacagttgagaaccccttaccgaaaatatctgaggccaggttggggtcttcgggttttattgcatctgcatttataaaatgggccgcctcaaggtgtgggactctaaacaggacactgacacacagtctgcaggaatttaatacaggatttttacttgtgttttgacctgagaccaacacttgaggccagttgtctagtgcaccattagtacttacacagtttgttttagataatgaatgttcagccagaataaaatctagataaatgcttgtagctgatagccatttactacccatcaggctgtcttgccttcattaaactgaccgtgtgtatgccgtgtggtagaaaccacagtttgtgaaagaaaaggtttcttttgggaagcgaatgtaggcgtgcacggatagtgaggtgtgtgagctttgcacggtcagagctggggaactaaacagagtgttagtaactggactcaatgatggccgtgatgaggaagttcctgagagaagagcggaattgtttgcacagttcaaagtggactgctcttataagatgaaatgaggaaggctaagtgaggtgagatgcttcacagtgccagccaaactggctgcccggtggctgtgcagatcttgggctatggcttgccactgggctgtttctccctgccagctgctgtacacgggaaagccaggctctgtttagatttaagcgtgtggggcttttgtcagtgagttgtttgttgttcctggatctgaggtccctggggggcggggcaggggtcacactgaaggctgcattgccacactttgttgttgtttgatagtatggagattgacagtgcagattagaatatagagtgttacatggtatagagcgttatgtagtctagactgttgcgcagttctggtcttgctgttacagagcactatgcttctgttagcaaatgcagcaaatgtgatgagaagtcccatgttgtacatttctgtgagaagcattttatataacatgataaatatttctgtttctataacctgttaaatatttctgttaaagacttgctttccccgaagttgcagaggtgcacactgttggaagttcagattacagcacacatttttgaggtgaaccttggaaagattgagagttgtgtgtctggatgatgtggttggttctcctgctgtgtgtcgtagatgctgacagtgctcgtccctgacgcatatttcggagtagacagatagcactgatgagaccctgcaaagtgcctgcaggaatcaatttgtgtttatatttataaaatgatgctgaacttgtggctgtgagctgcgctcggcccagagccactaggctgctgttctcgagctgtccgtctttgaacttgggataaggactgccctcctctgtgggctcaaggatccatcaaaggcagttagggcttatgccccagtaaagggtaatttaaaggaaagaatgccctggagccacccgactcagaaagatacatctacaatgcatccatgagtcctctgcgcctccttgacttttgattagttgtacagtccctgtgaactgccccgctcaccccagtgctccctctgcacatggtccagcctccacatttgatgtgcctctggatgctggctggcactagacttgctgttgtgtgtgttttgaagctgtccagtgcttcgcttatctttctcccattttaggagccacttttctcacccacaattctagcttcacacagcaagaactgcctcgcactagcggcaaggcaagtattactggattccgtggtagcagagttgccaggaaggctgaaggactagaatagcaagaagggcagaatggagagatggcagaacctgttcggaggtacgcagcagggccactgtgccctagcctttctttgcctcctcttgtcctttccgagtctatgtaagagcatgcacgcctgacagtgggtattgctatgcacacacccaggcacattcctcgtgtttgagtttctttgtgtcacaggataagtcaaagggtgtgtcctacacttgtttgggtctcttggcagtagtgtgtggagtcctttctctaaggagcagacaaggaagaagagttagccgagtgccaagttagttcctggcttgtactaactaaggcatgaggaggcaggagggtgggtttctgggcgttctctggtgagctaaagcttagtgtcatgcgcttatctgcatagttgaccatttagagtgtgttctcgtggcacctgttactcagtgaggtgtatggcattgtcattttatccaggggaggtatggaaactgctgatcaaggaggagatatgttctaacaaaggcaggtagggctgggactcactccagcccctgactgctgagccctggggagctttcccagttgtgctggcctgtgcacctgtgcatgtcactgtgtccacactgccggcctgtgtacctgtgccctgtcactgtgtccacactgctggcctgtgtacctgtgcatgtcactgtgtccacactgctggcctgtgcacctgtgccctcacactgcatctacactgctggcctgtgtacctgtgcatgtcactgtgtctacactgctggcctgtgcacctgtgcatgtcactgtgtccatattgctggcctgtgtacctgtgcatgtcactgtgtccacactgctggcctgtgtacctgtgcatttcactgtgtccacactgctggcctgtgtacctgtgccctgtcactgtgtccacactgctggcctgtgtacctgtgcatgtcactgtgtccacactgccggcctgtgtacctgtgcatgtcactgtgtccacactgctagcctgtgcacctgtgccgtccaccatgtccaccatgtccacatgtccaccatgtccaccatgtccacactgtttagtgtggtatcccagggtcgggaaggtgccacagccatcctactgcacagaattacttcagaaaggacctggatgcgcagtctgagtcaggaaaagctaatttgatattttgtattcttgttctgtctacttgtgttgcttaatgttgtaacatgtctctggttgacagcagccatatgtcattcaaatggaacctgtactttggcattggcctgacactcactcagctgtggagcccagaaatgaaaattacagaaactgtatctattcattagaccagtggaactgataagcacttttgcggctctgccccacaactcttggttttggcaaatgaaagtacagtagattaagccccctgctcttttcccccactgagcactgtatatttgtttcacacttgcagattactgtaaaagccagatagatgagcactttaaaagattatagcaatggaaaatgtgttttgggaatgaactgcctcaaaacaagtattataagaggtgttctagtggattctttttcatatcacattaaacactctgcagacgtaacaattttattttttagagcattgcatggttttctgtttcaggagaaaagggcttatgccctattgtttttgtcaagccttatgccagctctcactgggagtcgagctatatccacatgctctgtgcatgtgagtatattgcagagggtttgtgtgtgcgcacgtgtgcgtgtgtgtgcacactctgtgttcttgtgctccacacttgctctttcacaggaaaatgaagtcagttctttcttgtctgagagagaagcaaaacaaaaattcaacagcccagatctcagccctctctgcagtagcagatggcaaactgtaatcaggggaggctcctgccagccctcagtttcagaagtctgtcccagtggggactgctggcttcggggagcccagatgcccctgagggggtatatgagctgtgagatcggccaggtggtaagagagcagcgggctgatgccgccaagaggaagaaaggagagaaatgagagtaaatgaagaggtgttttctaaggggcggggggcggggggtgagagaatgaggatttggaagtaggcatgtgtaagaagttagaaaatgggatgtagtaatggaaagagaaagaaaagtcttgagtgttgtgtgagagtgtccccaaggcttcttaccaggtctgtgtggggtcctgtactgatgcagtgctgtgtggaacaaggcttttgctgagtgctggtcaggctctgtgtcatagggtcacagtcatgggtcgtatcccagcctaatggctgcagcctttcagtgctgtgtacattaagaaatgtgtgtgattgtttaagacttaaataagttttgcataaggaggtatttgtggctttttgttgtttcaaaagttttatgctttcagtaagcatttgctaatgtagaataaaggaattgtttaaactaaagaccattttctcgaatttctaatgcagggtaacaggaggatcaggagacggttctgaaggaagcagggcttgctccgtacagattggaagagggtttctctaggacttccggctgtttgtcaggtggctgtgcacacgcatcctcacaggcagagggtagcctgggtgctcttgggaaagcaaacaagccccagccattcctttctacttacctgaaatagcaggccacactcctcccctcaggctggccttgaactgtggaatcctcctgcttccgcatcctgagtactagggttagaggttctactgtgtatagccacctcagctagattttgtttttcaattaaaaacgctttactttagggggtggaagatgtctctgtgggtgtttgttgaagaagggggatctgatttcagatctcttccacacacatttaaaaagcaagaggcaaaaactccaaaccgatgggggcacacatacctatagcccccagctcagttaaagttgtatttctgggtttacatagagtgtgtgtgtagtatcatgatgcccagtgttgcatgagccacgtgtggggatgagggcctgtcacctgcacttcctgggacacagaggtagcagtatcagaagttgaaggctatcctttggctgcatactgagtttgaggccagcttggcagtggacacccaccccttacttcaagcctgggagcttgttagttttctgagagccaggggccagggctcctccccactctaccacctttttgtcccactcttagccccagactgagccccagccaccccctgcagcttcatgttgcctacagggtacacacccacttgtataatacatattcaagtcatatctacacacacacacacacacacacacacacacacacacacacacacacacaccaacacataccctttgccctgtgaccagaaatcctgaaggtaatgatgtgcacgcctgtgtctctcctcccgttccctggctttcccttcaagaaggtcctgctgctgtctccatggctgttgtaaaatcagtgctttctgcatctccagctctgctcactagttacctcagagagaacagcctttgtaattgaatattccttgcacgtgaccccgtcatgcagctacaaggctgacattgcagcctcagcaaaggttatctcttgaaaattcccagaactcccctgtcggcacatccatgctggcagccaggtttaagtaaggaactgggaaagctctcaactcctccttctgtccatgtaactatgggatctctgccaggagggtaggtaggcacatggctccctgtagcaacccccccccagcnnnnnnnnnnnnnnnnnnnnnnnnnnnnnnnnnnnnnnnnnnnnnnnnnnnnnnnnnnnnnnnnnnnnnnnnnnnnnnnnnnnnnnnnnnnnnnnnnnnnnnnnnnnnnnnnnnnnnnnnnnnnnnnnnnnnnnnnnnnnnnnnnnnnnnnnnnnnnnnnncagcctgactccagaatcccctgctgtcttggttgtgcacagagtgttgttgttacaaggctttcacttggggttttcttaccaccccccccccccccccccaacacatacacacaaacatcctgctttatagattcagaagtatctatagaatgctggagtttgggcaataatataataaggaagctctccagtgagatgccttcagtcccagtacatgagctcatctgtgtgccctctgcagcctgcactttctcggatgcagaattcccaagtgcaggtggcacaggcccttctattttctggtcacctctgccgaggaggtgctgcttctgggagtgcttgcatagatcacctggagccctttctctctcagtccacttgatggcttccatgggagaaggctttgtggagccctgttcatgcattctcaagatgactgcccatgtttggggagggggagaatgtttgtaaaggactagcagaactgtccaagcttccccccagcatggctccttttactgtcacagtcttcttccagctgataaccctcagtggattaggaagattgtagactgctctcttctggctgtctcgtcaccagcaggccctctgagttggtaatgttgctttcctctgccatgccaacttcacataatgtttagagtaaaattctttaccctgtgttacactatacgtcatctctaaagcaggctcctcttccttttgtgccgtgttttatctgaaagcactccgtagagtttatagaccgagtgttaaatgtccttgatggatgcttgagaaggagctggggaagtgcatgtatgattagggcacttgaacataaaactacataagtatgtatgaacatacctgttcatacttatgaacatacattttcatacatatgtatgaacttaaaaccctaattatatacttgaatgttaattttatacacagtaaaacctgtttaacctgggttgtaatggaaagtgtttcaccaccagcgaaggtctgtgttttataaattatttttttttattagatattttcttcatttacatttcaaatgctatcccaaaagtcccctattcactcacccgccctgctcccctacccactcactcccacttcttggccctggcgttcccctgtactggggcatataaagtttgcaagaccaaggggcctctcttcccagtgatggccgactaggccatcttctgctacatatgcagctagagacacgagctctaggggtactggttagttcatattgttgttccacctatagggttgcagaccccttcagctccttgggtactttctctagctcccccattggggaccctgtgttccatccaatagatgactgtgagcatccacttctgtatttgccaggcactgtcaaagcctcacaggagacagctatatcagggtcctttcagcaaaatcttgctggaaaatgcaatagtatctgcgtttggtggctgattatggcatgggcccctgggtggagcagtctctggatggtccatcctttcgtcttagctccaaactttgtctctgtaactccttccatgggtgttttgttctattctagggaggaatgaagtatccacgtgttggtcttccttcttcttgatttttttgtgtttttcaaattgtatcttgggtattctatgtttctgggctaatatccgcttatcagtgagtgcatatctaatgacttcttttgtgattgggttacctcactaaggatgatatcctccagatacatccatttgcccaagaatttcataaattcattgtttttagtagctaagtagtactccattgtgtaaatgtaccacattttctgtatccattcctctgttgagggacatctgggttgtttccagcttctggctattataaataaggctgctatgaacatagtggaacatgtgttcttattaccagttggaacatctgggtatatgcccagtagaggtaaattggctgaccttcagcagaaggtggaccttgcacactggggtggtagcggagagactagaatgttggtggagggctctttaaaggtaacaaggaggtcaccccacttttgctttggagtcgttcatgctatttagcagctgtacagactggcccactggaagcacttgtcagtcaggagacagggctggagagagcaggagtctgctcagctaaggaaaggcattggcctttcttgtttgaccatacatttattaatcttaagttgcatgagagttagggcacactccatgaagcttgacagagttaattttatgaaaattagaaggttcaccactttgtaaaatggataacaatgttgtagaatcactgtcctaaagaggtagcatagactggaaatacaaatgagtgtaagaatctaaatcagttcatggataacagagtcatccatgaactgatcatttacttaatgagagtaaataaaggctgctctggacacatccctgactcctggaaatcgaggttaccagaggcactattgtttagttcccacagccataaagaacattcgctctgaagagcactggtctgtgatctgctaaggaggaagcagttggacctagaggaagctctgagagattctgttggccaggaagaacataaagaaaccaagcaatagaatgacacctgctctttcctgtttttatctgaaaaccttctattgagtgcgcctaaagtttactaacaaatttgccattaaaaaaggctgttgtagccggtggcacacgcctttaagcccagcacttgggaggcagaggcaggcagatttctgagtttgaggccagcctggtctacagagtgagttccaggacagccagggctataccgagaaaccctgtctctagaaaccctgtctcgaaaaaccaaaaaaacaaaaaagctgctgtaacaaaagaacttttcattgtttcacaaatcaaaatgtaaatctatgttactacaatgaaaagcctaaatttcttggtggggggtagaagggtgctggtttgctaaatcattctaaaaaacgtgtttgtttttgagtctgaataagcagcagtgtttgtggtgtaaggtgaacgtgctgggaaccagggcacagaagaggggatggaagagggggcagaagaggggacggggtctacaggggcctgaggcacctttgagctccagcgcacctccgccttctggatcaaaggcaaggccgtcctttgaccctgcaatgatcctggagccctggagtgcgttgccaactctttcttagccccagctcacttgccgccgcgccccacccccacctctgtgcgtgtgtgcttgtgtggtggttctgttcttgaagagaggtggagtaaggtggaacaaacttgacttgcgtgcatgtgtgcagcgtgcatgctgaacacagtgcttgtttgttgatggcttattttcaagtataaagaactagttggaggaagctctggagtagtttctctttagctgagtttgggacaggagcgggctctctctccctccctcttttaaataaaaacatagaggaaaaaaaagcacctgtgtccttgagtcttctcagttggggttggattaaaccgcttggaaggaaacacttgcccaggtgaaggcccttgccttcctgcagcctcctttagggtgggcttgttggcctcagcaccccctcagctgcttcagccctgcatcagctgacgtgctgaatgtcttgctgtttttctcttgcatgggaaatattctgtgaatttaaaagctagcagaattagcctcagctgagtggaacttaagtttttttgttttgttttgttttcctgtgggttttttttcaattgtgtagattttacctggaaggacctaaatctaatgaaaaacagattgcaatgatttctgctattaaaggtaaattgctacagtgtttgggtttttgttgttgttgttgactcttagcagacagcagttgtaaataatcagaaatgaattgcatttttttctagggccatgaaaaaggtttttacaggctacgggtttgataagagattgtagataagtaattcgttgtctgtatgcacctccacactttcgtattaaaacagcatgatttagttcttggaagcttgtttccctaagtcccgggtcaggtgcatggacagggctccttatgacgtctgtcgtgggaaccagtgtgcttagtggctctgtcaggttttgactccgtctccctgcagtgagtctgctgatgttggacagttggatttctgcatttccaacacgcagaattaaacgcccagctgtgcaaatgtttgcttagttggttcattttttttctttaagataaatacctagagacagaattcaaggaaaaaagatgttgcttctatacacactgtgacctagcttagagacttgcttttttatttgaatagaagtcataattatttcaatatgcccagttgctctgtatttttcttatgtcaagtaaaaacctgtgaaacaaccattaggcacctagcttgaatatgttaaatatgtgttttaaaataacttatgggttagtaaaagtgtgcaggctacagtttcgattccttttctctattagatgtagatgtgtagtctcataaaattttaaggtatgattattataatgcccagattttaagttatatacaattggatgagttttgacaaagtccaagtattcgtgaaacgattcacaaattaagaattttttaaaatcatttttagaaagctcttgtgccccttttagtttctcctgtcctgtggctgttagtgtggtttctgtgatgtgcttggacctcgtacataggtgcatggagtgtgcctgcatttagtattctactgtttctctttaaacctctctcttaaagtacagatgctgattgtacttcttagaaccaaaggatcgggtaagagcagtaggcgcaggcgcttttcaaagaatgagatcgcaccccgcacctgacttaaatgcccatgttcaaaagtgaactctgagtggatgacagacctaggtgtaagaaagaagcttcaggctaggaacgtcgtgaccctctggagaacacacaggagcactgtcatggccattaaagcagaggccacaacaacaaaatcaaaaactgaaaacttaccgggcaggtggaaggaaggaagcggcagaaccacagcaaaaaacgcgtttgcagtgcctgatgacacttaataccgccctacagccctcgggtgacacgcccacgcacatggcaaggggacaaagcatggggggaggtgtttcccagcggccactcagtaggtgaagtgacatgcccaacagcttgggtcaccagggaaagcacagtgagtggcgctcactaggatggctgttcccggggacaccgtgtacagcagcatgcagggcctaaggattcaaagcaagcgccatcagaggctctatcgtcactctggatgcacctgggcaaacggaatggggtttagatggatgcttttaaggccttgttcagaacagcaccatgcacaaacccactgatggggaacaacccaagcgtttctggataaacggccttgtatacgtccagtggcctttagaaccctgcccagagtgagataagccagcagagcctgcacagcagtgtgtggccacctgcatgagagaagcagccatgtccaggctcgcagagctgagtgttgagcagcagctgcaggggctggtgggggaagagcaggagtcgtggttgtgtggtgacctctgcagatggacatggacggcgtgctgcctggctttgtttctggtaacttgacacagctcgcatcgtttgagaagagagaacttggactgagaaaatgcctccctaagaatttcctgattaacgattgatgtggcagggcccagcccactgtggtcctgggttgtgttataaagcaagttgagtgagctgtggagagcaagccagcaagcggtgttcctgagtgtcctctgcttcagttcctgcctcaggttcctgtcctgacatcttcatgactgtaaaccacccctaacccctgttgcttttgttcccaatgttaatcccagcagtaagtagtaggcgagctaggacaggcctcgctgacagcagcttgaatgggcggagtgtcactgcacagccaactcctcagcatggaggtcttcagcagagcctagcatggaagagagggctgggtctgtgtgaactgaagagagctcactcctctcagagcacagtaatgagcttgtttccaggccagaggtgggaatgggtttgagcaaattgcgtttgttggtgatgggtgtggagcagtcttaagtcttctgtccgcttccaagttgtctttctgcaggaacagttctatatgaactgatgcggcgggtcgattcaggtgtgccaaggcaaggtgccctcagcggaagctgggcggtgtctcggctttagtgtgccggagcttccgggagctgggctgccacagttctgtctggtgtttcactgctgcttagggggcctttagcctggactcctgttagcttaggccaaggctctttgggagatcaaactgttcaccttagagctgatttcctgaggtgccttgaaggattggtatcttgtgtaggagacgcaggaaaagctggcctgagattttgcagcccttagggctcctgttagtggatgaggccacagagggcccctgccccacgctaatcctttccagagggctctaggaccctcctaggttccccagcttgagtgcgctgtccccatgtcccttccttttagggctgaaagggtattagttggaggcaagatttcgatcttaaagtgtagaattagaaatgtaagcctaagaacaagatcagaaccacatgaaaacaaacctttcatgcaactacagtgagaatatgagttttaccacatctatatccctcctccctcctcaagctccacccactcactaccacatctctatccctcctcccccctcaagctccacccactcactaccacatctatatccctcctccctcctcaagctccacccactcactaccacatctctatccctcctccctcctcaagctccacccactcactaccacatctatatccctcctcctcctcaagctccacccactcactaccacatctatatccctcctccctcctcaagctccacccactcactaccacatctctatccctcctccctcctcaagctccacccactcgtcgtcaccctttattctctctgccctttctttccctctgttctttttccactaggagtagaacccaggtcccatgcctgctgggtagacattcctgagatagacaccctctctgcctcattgatttcgtaaaggcctagattctaccctgcccttcacagagtgcggccggtggttccttttagatggatgcttttgtgctgttactgtttgtgagttcagaactaatacccaccacagacaaatggcctgatgccactgtaacctttgcttgctttttgggtttttttttttttttttttttgacttaacacagtatttttagttttgaaagatcttgaaatatgtgttttgacagtgttgtgtgttttatgccacctttccaactgtaatgtaaaacttagttgctttttcctgtttgccttgcatgccagttagagtgcttcttcctgacagttgggacaggacccgacagagccgcatagtaagtcagagctgcttgtatctggagacccgctgggtcttgaggtcagtgatggagaaggagaaggagaaccttgatggttcattcattttggaaatgagagaaaggtcagggtatggtgaagagaaacatggggaccagtgtcccctcgtgacacagattgagactcgtttcccttagagggataatttcctggagagaacacttgaggaaggggcatcacatcacctttaggcacaccttcctcctccaatagaatccttggaaacactcagcttttaaaagagaagttgttgttttcaaatgtagaagtgtcaaattgttgaaatagattctttttaaaagtcatgagaaaacactgggtcccagatattttctggagatttcccattagcctagtttgctgatactctttatcgagcagccatggatggaagcacagggcgtgtggttgcagtagtgactgaaggctagtgggttccagggttggtacgctgctgacttcccactggtagatggaatgaacctgaaggcagggctagtgctcactcagcacaggtgactgcgtttggcgagtttcaattgcacatgctgattctctgacccattgggcaacactccttcatcagataacttagctggcaggtcctctgccaagggcatggctttggtgtgggagcagatacacacacagcccaaggctgaccacattgttctcgtggtaaaatgagtcagtcaggcctggggacaaggattgtggtgaacttgcctgctctgtgccagggtgacacctaaggcagaagtgcccatggccccagatcttagcatgtgacacatggtactgtcagcctcgaatgcatgttagtctgatagtctttgttgatactaaatacaattacaacagtagagactgccaagactctgaagagcccacatgtactttgcagtatgttcctcatggatgtctctaggcctttgtcactttgtcacttctgccttagcgccacagaagtaatatactgaatgatagacaccagggctaaacaagtctgaggtggactggagggtagtactgagtacctggtggccaagtactgagagggtgggcgacagtgggctcctgggctcttggggtggtctgtttcataatagtggcatttcatttaataagtctgaaaaagcatttggtgggtgtttctaaactggtcaaaacaaagccagttaaccattaaagaattgagccttagttccagcagtaggcaattacttaccatattgaaaaaaattggttcttaaaagcagtgcttagggtaggtaatgttacgtgacagcttgtagtttgataaggagcatcagccttggtatgggcacctgcctagagtccagattggttgccagaatcagtgtgaaatctcgagggaccccagttttacagctgtatgtgcatgacaatgacacatgggccatccagtttgccttgcctggcagacagagcagccctctctcagagaacgtctccatgtgtgtgagagtcagagaacgtctccatatgtgtgtgagagtttccgtaagccacggagtccccgtgggagagctcagcgcctaggggagtcgctgtgttgtctgaggcttcctgacatctcagctccggcaggcacgttctcctcacctgccttagatcacacaaggttgccatgtgagtctgcattagttaccgaatcagacataggtgctggctgggagtgcgtgcaccttgtcctgcggtgtactgttccagcatgcggacttacgctctagggacattctttggcttgacttcattcaatgtgaaatatcaaactgtagaataaataaagcaaagatttcagcagtgctattaatttaaaaaaaaaaaaacttgcctgcttgtagcagcctacattctgtgtggtgaaaagcccgtttaaaacctatttgaccatactttcagtggtcatagcagggaggttttgaaccaacaattggcctggactgaaagagagagaaccattatcccctatgcactattctcctttgaatcgttgtgtgtgctgtgaactagtgcattgtcttagatggaaacgctttagtatcacttcttttccattgctcagtgtttttgtaaataatttggctcttcagtgtggatctggtcctccggtttctgaagtgtgtgggctcctggggccgaggttcctggagttctctcgtggaccatattgtggtatcattagcaggaggtcttcatctgcagcagcagagcacactcacagcctgggttttgtttttctttttctttcctgctctcctaattgggtggtggtggggcacaaaaagattatggaggggaaagaagcaaggaggacactgtcagggctgtaatcccgcatgaggagggccatcctctgggtgtgagtgagaggctgatttctgccggcttggtctagctctggtatttgtaatacaagttctttgtttttccctgctctatccactaagaaaactactctctactagatgttcatccttcaggaacacgtttagggaggtattatttggtatatgtgttggctttccattactatgacaggatccgaggtaatgctctcgagtgggaaagcagtttctttggctcccagttttgagggcacaggctagtcctgcagctctgggtccttgatgggcaacccctcatggtgggaacacgtgacacagagccttgttactgcatggacagcagcagtaatgagtgtgcctggggccaaggggctgccatgcccctacgatcacaaaggcttcccagtaggtccagtttcctacacttgacctctgaggtacatgcaagatcaagcggttttgtttggtggtaatggggtacactttctcttagcaaattattacgtgcaagtgctggcgtcaccctctgccatcatcttacaaacagggctggggtgatctgacccagaagcacacacaccatgccttgtatccaaccacagctttcccccagtctgtgaaggggttaccctgggctgtgtgaactcactgcagtttgcctgttgtgtggggatggaattaattcaccatctccttggctttcatagcaggagcattttaaatgtcagggtcagggaaggaaccccttgccactagacttttatgacttgatactgataaagtagcattttgatggcaatcccacatcaccattgacttcatgggtagcacgtaagcagaggcagaaagtccgtttgtctaatgaagacagaggtaaagtgtggaatcgagaacccttttcccatgatggcgtcaaagccatatttgagttgagttcccacacctcttcagttcctcatttgctctatgtaactttctgacagatgccaccgcagtacggacagcaagctgtgagtggctactgccagcaaggccagcagccatactacaaccagcagccgcagccctcgcacctcccgccccaggcacagtacctgcagccggcggcggcgcagtcccagcagaggtaccagccacagcaggtaagcgctgcccgcatgcatctgtgttctcctgcagggctgtgttcagaggctgctggcgccctgaacgtcctcctgccctttgagaggcactgtgggggttgaggtgcgttttcccctttggtgtttcaagacagagtttctccgtggaccatggctattctggacctcactgtggagcccaggctgtcctctaactctacccacaaggccctgcacttcccctcccttccctccttccctcatctccccactactgcagacattgaggactgggaagaccagctttcagtagctgcttctgttactgattggtggaaggcagcacaagtgtcagttcacttcacatttgtgttctcaaatctttccaaaggcctttccacctagagaggcctggtcaggaggggttgcaggtcatgtgacggtgtggtgctggttgccttttgacctttctagttaggacattaagtacctcagcatgggaacatggtcgccttggagtgttagtcttataaactataaacatggggtcccttcagctgtagaacaagggagacacaagcagagcggcagtgagctacagtaaacagttgctgggtctttcctgtcctgcctggctcctcccttctcttccctattttcaggaggggtctctggcctcgacctttgatcctcctcctgccactggtcccctgcgtgctggaactgtgtgctgccaccgcacacatggagtttctggttgaaattagactaattaatcacctgttttggaggcaggtatgctggctgagcaggtaaaggcacctgcctgagcccagtgattcgcactcatccccagggctcacatgatagaaggaaattagattctcaccatttgtcctctgacctccatgtgtgcacgcacacacaaatacatacatgtaatagaaatgcataagtatttgttattgggccatctattgtagtttacataattgaaaaaatagtataatatatattgtgtgtgtgtatacacacacacacacacacacacacacacacatgctgaagtgattcagtttcatttgctttagactgttgctcttgagtggagtgaccagttgggaggggctgagggtcttgtagtgagcgcagacatagcacatagctgctagaggtcctcccggaagcagcgcctctttcccagctcaggctgccctcggcactttctctgttgtggggtgggggtggtaatgagaacaagcaggtgctcacaggcccgctcacttgctaagggcttctttatggcacaaatagtcaaatatgtaagcatgtgtagtttctacatacaaagttttaatatttcttttagttatgtgtattgtgcgtgtacagctatgtatcttggagtgcttcgcccgtagcggagtcagctcctaccaagagctggagtttcaggtgattgtgagaccccttaggtgggtgctgggaactgactcagcaagtactcttaacagctgagccatctctccagcaccatggaactgaattctaccggagtgcattttaaagtgattttgggatttttacagtccattgccacatgactttgtgtattttaagaaggtgagcagccagtccagggtttgtggaagtggggtgtgcagcccttcagttatctagccctcaccagtgcgtgaacatttgaaagcacttcctatcagctccctttggtgagaatgactggcatctgggctgtgagagataaggcttttcgaggactttcagagccctattgaactcatcttgggtgggggtgcttggtcacttcatccagatactctagtgcagacagcctgttcatcttacgctcatgggcctaaatgaatctcagttgtaaaaacagtttgattaaggactcctgagtacctgtcatttcctcaggaccacgctccaaatttacttccttcatgaagtgttcactgatggcttccagaagatggcaattagtcacttcctatttttcatatttaaatattgacagcatgccacaggcagggccagttctaatgactgctctgttagttacttagtttatggtttccttttgcagttcttactgtatattgacttgaatgcagtgagatatatgataaaaactgtattttaaccacaatggctcaatataagaattattattttaaaaacattctgagtaaagccaaacttgtcaggactttttcttaggttttcttgtgtttgtttgttttttgagacagggtttttctgtgtagccctggctgtcctggaactggctttgtagaccaggctggcctcgaactcagagattctcctgcttttgcataccaaaatgctgggattagaggtgtgtgccactattgctcagctgagtatgtttaaagtttaatttgatatctaatacagtgactatcttaaaagggggggagaaaaacaagaaaagtttcttgccatcttagttactcctagccatgctaccacctatatcacactttgccaaataaccttacaattatagatacatatgtacacacacacacacacacacacacacacacacacacacaggaaattacaaagtatcatgtaactcctgccctcttttgtacagttgaagatgtactgtaagctgtgtgtattccctgttactctttcatgcacacacttaaatagattttctagagctactttcatttctttagagccttattgggttttataaatcacaatatatttagtcggttctttttaatgtcatttagatggtttctaggtgtttccaacagtgttgcccttataacttgtgtatgctgtttcttacatagacatgagtagggaggatctgtggggagttcttccatgcagctctctgtcagaggacgggactttgtcgtcttctagatggttttgccagatggtccactgtggagggcacctccttttgtacccaccacaagcaccttaccctgcctgtcttcagtgctaggcatggttttctgggagataaagctgtgggtctggatttgttagtgtttttcctgagctataaattcctatcttttaatcttgatttctttcatttcagttttaaaattgatttatgaaaattctgtgcattttggtgggctccccagaaatcatgaatatcgtgtgtgtgtgtgtgtgtgtgtgatcttgattgtaggaaccggggatggtgggactgaggaggtgactgatgggcagaggtggtgcctcaagcctgagggcgtgggcttagcctctcaggacccctgtggtagaagaagagaagctgcctccggaagttttccttgacctccacgcatttgttgtggtctactgtatgtatgtacacagaagagaaagaaacaagatgaccaggatgaaaagatggagagtgacaggccccaagtttgtgtgtggacaggagaccatcccagaagggccctggtgtgggtacggggtgcgggtgcgggtgcctgtttgaatctggcctcgggagttggatgaggcctgcccacaccaaaggctatttgcttgattcaagtcgccggttaaatggttggtttgatccagagaaattgtgcagctgcactttccgtcctccctggagaggtggcttctgtcacttgctcagttctctgatgtgtgctgtttgaattcactccgggctccattcttttctgtctggtttcctctatagtagtttttgtttgtttcttttgtttctgctgctgcttggtatgtgctaattgcacatcctcagtgttctttctggaattttctttcttatgttttgctgtgtaacacagactggcctggaacgtcctcttctccctttgctgggactgtaggcatgtcctaccatgcctagcctaaccctttttcgtttctttctgttttttttttttttttttcctccttaacaaatttgtctgtttctgttgctattgtaattgtgtgttttcttgctttatatatttttctctggaatagttagttcttcagtggaaagccaatcagaacagcgtgtgcagttgagcccagccatgaaaggccaggacatgtgactctgagtgtggcccactagattcttgtgctgtaggccagggaggatgctggcccacagaacccaaggagcatcttgggaaggaggttgttaatagtgctgggtgtggtgtgtaagagggattagggagtgagagtcagtcctcaaggccctggggaaaactgggtgatttgaaagtttcataattggcagggggagtaaagtgatatggcgttgacatggttagtgaggccaaagtaatggcagcactgtatgctgaaggagctgccctgcttccctgccgttctccaccccagctgcattgtgtcacctctcacttgactcttcaggcagctgatgctccctccactgtcagcagcactgccccaccagggagaacctcaggcctttcttcttttgttgctgttgtaaattgtattctttttaaaattatgtatgtgtgtctgtgtaagtgtgtgtgtatgtgtgtgtgaaagtgtgtgcctctgtgtgagtgaaagtgtatgttccgtgtgttaagtgtgcgtgtctgtgtgtatcaaagtttctgtgtatatatatgtgcgtttattgtgtgtgtatgtgtgtgtgtgaaagtgtgtatgtctctaggtgttttatgtgtctgtatatgtgtggaatatatgtgtgtgtgagtgtgtgcgtgagtgtgtgtgtgtgtatgtgtgtgatgagctcagtcctctgctgtctgttttctgggtgacaggtgcacactcttgtgagggctgtgcttttttcatgtcacttgattttcataggttttgtcatttaaaacatagttaattttttaaaatacagattatcttctgacttctttttttttcctttttgcaccgagcctttcccactgtgttgttggagggagctgacaggccaggcctcttagtcttgagtaaatgaaagtgtctgtgctgtgtgagcctctcttcttctgggagtgttaaaccagcctcaagataggctgtatacaggggtgtgtgtgtgtgtgtgtgtgtgtgtgtgtgtgcatgtgtgtgtgtgtgaaagtgtgtgtgtgtgcatgtgtgtgtgtgtgaaagtgtgcgtgtctttgtgtgcacagacacaattggttcggtttttctgacatctgtttgggtttctcacacaagtatttgtgagtgagattgagctgtaatgatcttttagaagagctggagtctgtggcacttagtaagtcacttgcagacttgtctctttcctatgtccctggaaaagtttgtggtgtttgaagtgaatggtctgtcctttgaatgttttgcagaagtgtccataaagccatagcaaatgatgatggatttcttaatttttatcctttgtttcattcttgagattttaacttgtgattctgtttttttttttgtatgtgattataagagttataaagtttttgtaaaattggttcacatgagtctggttatttcacttttaactgtattaaaataagttcacagtcctcgttagtatactcttgtcagacccagagctgaggcatttgagctgacattttttaacttttgtgttgacactaatgacttgtccatgttaatggctctgatggttctatcctgtgtgtgagtgccattgatcatgtccctcatctcctcctaacatcatcccttcccagtcttaaaaaccatttatcttctgcttctagctcatctagttaagaaaaatcatttttggtaaaagctttttcagagcatccttggtctttgtcttttccattaatatgtatgtgggtatgtatatacatgcctgtatatgtatgtgtgtgtgtgtacatatatgcatgtatgtgtgtgtgcatgtatgcatgtatgtgtgtgtacatgtatgcatgtatgtgggtatgtatatgcatgcctgtatatgtacgtgtgtacatgtatgcatgtatatatgcgtatacatgtatgcatgtatgtgggcatgtatatacatgcctgtgtgtgtgtgtgtgtgtgtacatgtatgtatgtatgtgtgcaccacatcactcacacatatgtattatgttttgctactcttctgatgttgtttcttttcgattttaggtgtatgtttatcgtctttggacccttttatctaagattaatgtatttcttctaatcactgcaccaggcagtttctccagctttgatgggcgttgtctttgtctcttatttctgaggattatctgaggatgagtctttgttttctgaaagtgtttttatgcagactagtaaggattctgagctggtttcctcagaaggagtatttagaaggtctttgcttggcctgttatctctaagtactgatcccttctgggtgctagccacccatgggtgctagccactggagccacgattcatccttccgattgtgaagtttctctcttagaaatgttgtgagcacgttcatgagcagaactgtacgacctgcacacagatgcacggatgctccctgcattccgtcaccattccacgcccatcactctccatcttggtctcatgcttccttggagtatcatggacacacgtgccatttctagatagtgacatcttctccaaggactaaattctccagcttgctatctcctaaactagacctgttgagatatcagccgtcatgtgtgtattttgtctgtgtggtttcaagcagaatgtagacaaggctagtccactgctgcgtccatcccttcttcctctgctgactttgtgccttgacttacggaaaactgggtcattgtcccacagagcgtctttgccggctgttttgtctgacatagctgaacacattctgttttctgcccactgtcagcaaggtccactggcttgaagagcagcacatatccatgattgccttaactcagccccgagtgtcccccctgctctcatcaagtggctgtgctgaatgccttttgtgtggctgcctgtggtggctctagctctcgcctttgcagtcactaccaactgaggcttggagacatgagaggcagaccagcctttcccctattcccctccatctttctcacctactacatctgtgagtgtaactcacaccttgggaaggctatgggttgtatatcctgggagcttataacatcacattaacataatgcttggttgtcccacaacagctaagccaagattgattagagggttcctgtagtatgtcctctgggaccactttaaataaaattctccttctgcggttttgcacaccacaggggcaagtgttaattttgaccagacaccctggtggtggtcagcctgtggctgctgattctcaaaggagctgtgccttttattcccctgcctctgctccaggcccacctcttccttctctgttgtgggtgtgtaccctactggtcaatggtccttcatggtctcctgctttttctccatgctgtcctcccacctaccagctcagacttctctcccttcctgccctggcccttgcacagtagccaggcagatgcgaactctggaatagaagtgagcttgtcctgtgggccggcaccctgtgctcttgagtgctgctacttgcattgaggccaaggatggcagaggtctcctctctgcagctcaggtgcttcagacaacagagtagccaatcgctctgcttgtttgttattatattgctgaaaactttataaacacaagtaatttagaaggatcacatttctctttatttttaaattaaaaactttcctgatttagtccaggttgacctcaaactgaggctcctcctgcctcacccacctgagtgccagacgttccactctgcctggtttaagttgctcattgtataaaatgaagcttttctaaccccccttttcattctaaagaatgttcgtagataaagaagctacttccagaatttgtttggttatgcaagagaacaacctctgtttttgacaataaacactgagatattgaatgataaccgagttatcatacctgtaactttcaagtggtacaaaatcacaattacatccatctacttgtctgtctctatatctggctacagaatgatggagcaatttaaaaaaagataactttgtagaatctgggtgtnnnnnnnnnnnnnnnnnnnntcagacaacagagtagccaatcgctctgcttgtttgttattatattgctgaaaactttataaacacaagtaatttagaaggatcacatttctctttatttttaaattaaaaactttcctgatttagtccaggttgacctcaaactgaggctcctcctgcctcacccacctgagtgccagacgttccactctgcctggtttaagttgctcattgtataaaatgaagcttttctaaccccccttttcattctaaagaatgttcgtagataaagaagctacttccagaatttcaaataagccagaacaatgtgccaagtctgcagtagaaatgaaagcgaagctgtagttaatgccgctgtgcagtaggcaagggctcagatgcagccattcgaagcctcctgcagggtttgatgttcatgagtggtctcgctggccttcacagcacaagtagagagctggcaggagccttgtgttgttagcatgtcttatgtttccagcaagaccatcaatatggtattctgtgctctgatggtgagacacgtggggtacagttctccacagcacagcacacaggcattagttagtacactgagtagtcttcctgggaatttagggcatcctgaaacatccacagaacactttgttcctctctgcaaatagagttggtctctagacttaaacagttagcttttgtgttggtatttgtagcttgtgtgttgggagggggtgggggggggttcaggcaggattgagtcagggccccacacatgcaaggcaagctttgtactaattggccgttttcctcatctgctttttactctttgtttttcagttgcccagtgtggccttgacctcactttggggcttaggtaagccttgaactttcagtcttgctgcttcagcctccaagtagcaagtctaggcctttgggcttggctgtgtttttaggttacgcgtgaatgctgggactttttgaggtagcgtgggctgtgatgtggatccgtggctactccagcttttcctgcacagcaccacaggcctcagtgcccttctgtggtagtagctcttcttcaccatctgtctgtgcatgtgatgtgtgatgtggatcagggttagcacactgccactgcagaggacagcctttggagactggcagccgtggtggcagccatttttcctggggacctttcgccagccctcatcgcacatctttacctttgtgacaagcagttgctcacctggcatcttgccattttcttagctttggggaaatcaagttcatagacagtttgccttacactgtaaaacattaacaatcaggccagtccctgtgtgtagctaaggatagcaggcattggcacacacttattatttccccagttaaagctgtgggagactgaaaactctgttaccagcaagggggccacagagtgagctcgggtgtcagggctagctcaaggcccaggcagcctgcctctatgtgagctggcagcacaagcagtcctcagggaagccagccaccgcagggaactgttctggggaacttactctttgaagtgttcaccagggagggacttggggagagggaccatggtggtggtgtatgcaaacagattgtctaactgcaaagagaagttgctccaaacactgtagaactgttgcaagtgccttctgtctgatcatgcattccgaattaacatgtaatacttcacaacactgtggcagggcagtggcgtagcagattaggggcttggcatgcctgtctgtcctgtaatggagggcttgggagtacctctggccagccctctgcatttccttcctccttaactagctggactcagtacatcttcataatctctggaaatcctctcagatgctctactcccttagaaacccactcctaaaccaggagcctccctgctcctatcctctcagagcaggaccaggaggaggcctggtggtcttttcacttctgatcactaaagataatccctgccgagactctgcacctcctcaggttacctcacttacccttcagtgttcacatcctaaaccttcatctcctaggccatgctgctatctagttcatggaggggtgagatgctgcagcccatagacacaaaggttgctgctgccctccatagtgcctcacaggagaccccaccctcccccatggcacacatatacctgcctttcccttctcttcctcaagcactgctttctctttctgttgcttctgtgggcgtcagaacacgctggcactcttctcacccgctatcttgtctttcctctatggcccattaccacttgaatttacctcactagataagacatttatttcactacttgctgaaacagctctctccgtgtggtttttgtgcctcttctgtttaaattggcaggtaaaattgtaagtatcatcccgtatagcaggatgctctgaaagtatgcagacattaggggtgactgaacccagctaattatggtgtgcactgctcacatgatttttgtggttggaatacttctaatccacttttagcagttttccttcacagtctattgttaaccacagtcaccttgtggcacagtgggtcccctgcatgcatttttccagtgtcctttgcccagtacctccatcccagcctaggttctgacaagcaggagtgtgttgtctgctctgtgtgcttcctccctggagtccacaccagcctggatcagatgctcagagagaggaggccccacccttccctgcagatgccattctttctgattgacctgtcagaagcatttgactgggcgagcatcctgtcctgtggcttcttactttcatcactgacctcctggctctcctgggacctcttggtcaccactccctctccactctggtttctctttctctcccttcctccaagtgttgaccttggtctggcctcagcttcggagcctttcatgtccccacggttcttcactgtatgtcttcggtgtcgtggtattgactatctagtgactgtcagatgtacctgtagatgggactctcctccctgcctgtccagctcctgccctggactgcaaagaagatgactcaaaaggttctgaagctaacataaaaccatgctctgggccaccactccttctgcagatctttgccttctggaactccttcccccaaataaatattctctttttcctggcagcttgaccagaaacttcagaaacaaaaacattatgtttgtcttgttgtgtgtgccaactcttgacaattgtgtgaaattcagagacctagaggcccgcctgtcctgcctgtagcactccagtgccgtcttccacttgcctctctgcctttctgctttggttttccctgagctgggtgctgcatggtttgcacagacctgtgtattagggttttggtattgcatgcacctccccagtaggaaatcagctttgtgggaggaaggactttgctttgtggttcttttatctctagtcctgaggtcagtgtctggcacaaaacagatagacagtaaacattttgaatattgttgctattttaattattggaagtatctttttacttttctggtgtgtagcaaactgattttttagtgttgaaaaataaaacatttgctgtggggcattaagattttgtgacagtttttgataaggcccttatggaggcagttcaaactggctttttcatattctgtgtgtgtgtgtgtgtgtgtgtgtgtatggggggggggcatgtatatgtgtgcattcaatcctgcctgtgggccaacagggtttgtcttccccaaatggaatgtcagggtacagaggagcattcttttagaaacttgtatttttttttttagattcctccttgatcggcttaaacaagttagaccctcccttagctcggctgtgtgtatcttttagcatgtactttccaatggctcagtagtgtccatgactctacgggcttgtgaccctgaagggcctgctgcattgttcaggagcacgcggaagaggtcctcttgcacacttgctggtctcttctgtgctgctggccttgaggctccgtgaaccccacattcccactgctcctcacaggggaggcctaggctctcttgtcttctcctgtagacaggtagatagctagcatagagcagcgagggactgtctgccaaacagtctgttgttcccttcgtttataaacaatctctattcctaaggccttaccaaacaaagaatttcaagtatgtccattcaaaggtggtttgcatcttagtttcccattgagtattagggacaactgtaactttacagttttttctctctttcttctttttattttaaaaagatttttaaaatatatatttattatatataagtatactgtgtgtctttagacactgcagaagagggcatcagatctcattataaatggttgtgagccaccgtgtggttgctgggatttgaactcaggacctctggaagatcagtcagtgctcttaactgctgagctatctcaagtttgtaggcgttgttgttgttgttgttgttgttgttgttattgttctgtgcccagtggccttctcatccatagctgtttgggggttcttggagtatgcagtgcagggcgtttcctgcctcccagacgcctcagcagactttccctccttcccctgctatctacagagtgaaatggaatgaaggagagggttattctatcgggttcttgagatgacaatgacaggaaagacagggctttatggtggaaaacgtggtcctccgtctctttgctgggacaggggcttctgatgcagcttcacctttaagacctagctagtaagcagcctcgcatgaccacaccctccctccatgcctctaacacctccattatcacagctgacaaaagccttcctctctgtcaagggttacaccaataatctcaccagtacagctgactcagggtcttatagtaggatgcatcattagaagtctgcagcagaaagcaatggggacattcagactttgcttttgtgggtatagtttatggttttcagtgtgacccagacactgaggaaaatatcaggtattttgaatgtgttctatttttttttcttttttcttttctttttttcttttcttaaagcttttactttgagtcttggaaaacttagaggtacacatggagaagacatgatcacagaatggagacagcccaggagcatcaatgcctgcagctaatgctggagcaggggtttgacaggatagtggggctagaggaatggacttagtattcctctctccctctcgccttccacacaatccacaccagcctcctcataatccttctctagggcagccatgttctcatgggcctcagagaactcctcttcctctatgccctcatccacataccagtgcacaaaggcacgcttggcatacatcagatcaaacttgtgatctaggcgagcccaggcctcagcaatggctgtggtgttgctcaccatgcacacagctctctggaccttggccaggtcaccaccgggtaccacagtgggaggctggtaattaatgccaaccttgaagccagtggggcaccagtccacaaactggatgctgcgcttggtctggatggtggcaatggcagcatcgacatttttgggaaccatatcaccatggtacagcaggcagcaagccatgtatttaccatggtgagcgtcacatttcaccatctggttggttggctcaaagcagacattggtgatctctgctacagaaagctgctcatggtaggctttctcagcagagatgacaggggcataagtggccagagggaagtgaatgcgagggtagggcactgggttggtctggaattttgtcagatcaatattcagggccccatcaaatttgctggaaacagtgatggaagacactgtttctggctagtaaggcggttaaggttggtgtaggttggaagcttgatgtcgaggtatctacaacagatgtcatagatggcctcattgtctaccatgaaggcacaatcagagtgctccagggtggtgtgggtggtgaggatggaattgtagggctcaaccacagcagtggaaacctggaaggggaggggggctgggtaaatggagaactccagcttggacttcttcctgtaatcaacagagagctgctccatcagcagggaggtgaacctagagtcagttccccgccaaagctctggaaaaccaagaagcgctggagacccatgcactggtcagccagcttgtgaatgctgtccaagacaaggtcaatgatctcctcaccaatagtatagtggccatgggcatggttattggcagcatcttccttgccttgctcagggtgaaggagctggcggcaggtgccaggatgaacttcagtaactatgcgttccagttctacaaacactgcccgggtcacatgcttgccagctcctgccacgctgaagaaggtatagaaggggtcatctcctccccagtggtcttgtcacttggcttctggccatcaggttagatgccatgttccaggcagtagagctcccagtaggcattgccgatctgaacaccagcctggccaacgtgggtggagatgcattcacgaatgatagcaatgggttagaaagcaagggtgatagaaggagacactgggtcttggttactgttcctgacagctaagagtccaggtaagtaacacaatgaggccttgaatgtgttcttaaggctatatatatttgtctttatctgtgtgttaacttcaggtcactgcagcaggtatgacccgtgataagagcaaaacatgtgagggtgtggctcagggttcctgtctgtgcttagtagggccttgcctgctactgtggggccccagtaatcaggagaggcgatggtagagtagcagacaagatgttttccagccatgcttctctgtgatagaatagggacatgtgctggttgaagtgtctctcggaaggtttccaggatcgagagtgtgtattggtgagagatgtggtctcagcaagggccatttatttatgttagtgaaagtggagggcagtctgctctcttcgtggtgctgcacttcagaacttcagtctcactaactaaacaacaaagaagacttttcttcctccctactcccctgagattaaagaattaagactattaaaaattttaaagtttttagttttagtttttatttatgaacgcccatgggggccagaagagggggtcagactccctggagctaaagttttcaggctattgcaacttagctgatgtgggtgctgggaactgaactcagctcctccaaacaagcagcaagctctcttactcactgagccccagctcctcccccagctccattgcaccatcctaacagtgggtcagtcgtttggtggttgagacagatggaagtctaagccttgtttaggtaagcttggagtatgtgaacaggtgttttaactatattttcttaaaacaaaacaagagttgaaacataacatagtatattgtaacaacatataacaattatctgtattaatatgcaaaatccataccaaatataaaaagattttgcttgttaatgttctttggtctaaaagtagattgagtaatctacccttttttcctatcatccctatacccccttttttatcttcatttcttcttccccctttcttcctaacactagataggagagaaagaaggatagaagaaagaaaaagaaatccctgaattcaacttctttattttgtatcatccctgcccaagaccattacaactttaaccaccccccttaaactatgacaaacatccatcatccattgagtgacccaaaaccacccccagctcttaggaatatgggcattgctttcttaaaattggggagagggagttggaggtcctaggaaacttgagatgttgattaagaaagctagctgtagcgtttgctgtcgagtctttgcaagctaagaaagttcagggcttaaatgaattcctgactggaacagtccgtgatgctggataacaaagctagccatttagaaattgtcctggtgcagaggtttgaggaaacagaattgagactatctcaggtaggattgagcaggatgctggaataaatgtgtctcagcatcccagcatctcagcctctcagcatcccagcatcccagcatcccagcatcccagcatcctttcactatccccaaggatgaatcttgtttaggcctctttaaattcattggtgtctataaacatataaactttcacaaagtaacatacatttctacaataacatatgtgatcaatgatcaattaaagatgacttcctgttctctgtttaagcaggtaaggcacctgtctttctttataagttagtatgtaccgtataaccaaactgtaatagaattttttatctatgtcaattgaaaggctggcataagtcctgagattgctgtagccaacataatgtattggctgtacatagatgaagtctggctggagacattttaatgtctcagccattctcggagctgttcgcatgtagaagaatcaacaataccaggtacatgttttgttgttcttgatgtctttcatatctgcagtcaggatcttcagggagtcttcacctgtcaaatccccatgtcaaagcatttcttttcctgtggaaataaatacaaaacctcttccctagtgtggcacacatccttccattctcaggtcaggacatccttagtaaaatggctgatttagtgtagcaggcttttccataatccagggtctctcagtagctgttgggttttgttcattagcattcaaaagctttgaagttaatgaggcactgtgtaatctatctctgggagatcccgtctccttcttctcttctgtgagcattgcctttaacgtgttgttagatcctttataactgtgggattgttgagaaatatctgtaacatgttctatgagtaatgtctaaaatattgttgcattgtaatggatacatatgtcagagcatcatcagcgccatctgccaaggcatctcagatggaccatctcttaataaatgtgtcatctcagaatcagcgttttcagaatttaaggcaaaagccacttggaattctgaacatgtatcaactgtatgatgtattaacacatatttctccagagtctataaaatgaaacctaatctattgtatgacattgctctaaggtagcatcatttagcagaatctggatttataattcacaatattgcatctctatgggctgccattctaattccttaagccattgtggatttttttcatctatagttatttcgaagataatttaatggtttcacatcagcatttgtgacctttattgtcaaagttagtagttaacctctacattttggagtgtactggattataatttgataatactgtatttccatgtttaacattttcaaaagattttatttctttttagaatgaggatcaaaagggaaatccaatcagagactgagtaatgacatagtaatgtctgcttgaacacttaatttccttcagaaaggtgggagagggtgggttcctgcctggactctgtaggctggagcactggagtgtgctctgggctggagtgtctcccaggcctcccatgagcatctgctttgtagagtgctgggtctgttggaaaagtggggagagcctgaggaggggcacagtcatcaaagcccttgtattttatggccttctcttctcttgatgcttatatgctgaggcgagaaaattggggttcccccatttttcttttcactacttttagcagttttcatttgaatttaaagtgctcattttagtatgttagagtttgaaaaggagactcaatttagagacaaataagtgactgattcagtagttccagtttcaggatcccagtaccctctttgaggctataactcattatagagacccattgccctctctctgctggcctccatggctaccaggcaaaacagacaagcatgtatgtaggcaaaacaccgcacacagaaaagtaacgaacaaactaaaagttcttccttctcagtcattttgatgaaagacagttctgtagagtagcaagctgtgcatgtattgtttcagttgaagcaaattcataaatgctcacaacagtaccattactgggctttcctagtgtaggttatggtccccaccaccacaaccaccacacatactaaaggggataacaacaggactaactcatttgcagactgattttcccccaaaacttggagtatgaggtggggactctgttcattctctggattaacttggtgaaagcagtaggaggcagagagtccgttggacaggcgacagtaaggattcataaaacgcagagggagggaagggccattgacatgagaactgttgacagcgggggatttacttagcaagttctctatcccagctgtagtctgtggaggactttagtgtcagtctttagctctactagaaatcagagtgtacatccaagtttgagagcctctcctgtacacagctaactggtgccttccagtcatggaacacagttccggtacggtaatctgttcctgtaacactgggacgccacactgaggcaatgcctggagttcggattgactgcagctgtgctttaatctaatgggctccccgtctctctcattgctatttatactgtggagacacattgtgctccagagatgggcagatggtcaagcctagaggccatcggtgacagtctttccctttgcttccagatctggtgtttagagcacagattgttggacacccactcttggaggttctgattcaataatttggggcatgacctaataattttcctatctgtaaaattccccagtgagaaccctccttgggaaccactgtagactaccctagattttgaagtaacttgttaaattcccggaccacaggatgggaattctgacagttctgatgtagcaaggacctcaggactctggacttgactattttactagttgccaagtatgttggatatatccttgcttcacaacagtgattctcatatttaattaaatgtaattcatggtaaatctcacattgctagacatttctccttttacccaagtagaaatttagttcttttaactataggaacccttagacagaatatgaacacacacacacacacacagagagacagagacgagagagagagagagagagagagagagagagagagagagagagagagagagaaaacaatccttaagcaagctagactttctgttaattcttacaagtgatgtatatggcctagcttccacagatcagtaaagatgagggtgcctggatccaagttctcttcagtgtgatttttttttttaaaaaaccctctcacattcttttcttttctcctcctcctcatcannnnnnnnnnnnnnnnnnnnnnnnnnnnnnnnnnnnnnnnnnnnnnnnnnnnnnnnnnnnnnnnnnnnnnnnnnnnnnnnnnnnnnnnnnnnnnnnnnnnnnnnnnnnnnnnnnnnnnnnnnnnnnnnnnnnnnnnnnnnnnnnnnnnnnnnnnnnnnnnnnnnnnnnnnnnnnnnnnnnnnnnnnnnnnnnnnnnnnnnnnnnnnnnnnnnnnnnnnnnnnnnnnnnnnnnnnnnnnnnnnnnnnnnnnnnnnnnnnnnnnnnnnnnnnnnnnnnnnnnnnnnnnnnnnnnnnnnnnnnnnnnnnnnnnnnnnnnnnnnnnnnnnnnnnnnncacaggctccgttccaacattcctttaaagggcccagttattatcacacgcctggtaaacactcaccaggatctgttttgtgtcttaatttggagagattttggtgtgaggagacccagcagtacaagactttttctcttgcttcttcttcttggtcctctgtctagtttccttcagttcctcagtcttactcaggaacacagtctacctcatctgagaatctctttcatagtaggctggcctggctggttcgagggcaacctccacatcctttctcaccagctggcctcataatttttgtaatgtttctcttactggaatctggggctcacagattaggccgtgctgactgccagggacactctgggagccacctcccatgtctgggattgcaggaatgcatcaccacagccagctctgaagtgggtgctagggactgaactcaggtcctcatgcaaggcaagtatgtcaccagtggagtcttcccatgtcacctttttggttcttgtagcttttactccgtcagcatttctgaggagtcagacaacttttacagatggcactgtgcaattcttagaaattagttggaaagcctgcagttctctctccttggcaaacaaaggttctgtttatgtagtctgtgggtttcatccattttcttagagtaggttgctatcaggctcttacgtgcctcatagtagtcctctaattaagcacgtgcgcaatgacaaggtgttcagtggagacagctattcagactagagttaatcgggagctagagctactactgtgcatttaaatcagacactaacagtgtttgaggagtccttagtaattttatttttatttccgttattttataaagattataatgttaagttcagttattcataatcaatctgcttttataaatctcagggaaattatatgctttttctgatgaattcgcctgttgatactatgttgatagttttccccagtaaaccggtttgaggatctgataaagtctgtaactcctaaccctgtgaccatataaggtgccatacaaaatcagctccaacttcagggtagggttcagtgtcatttgctccaaagtcaggaatgtaggcctttggtgaaggccacagcgtcctctgggagggagggcctcgcctgtctactgagtgcagccctgctgggtgtgtccccttaggtgctgtgcatggagcaggaggaatgtggacaattttttcttgccaccacttcttatgtgttatgatgtagctatttatgtagcattgatattgcattaggtattttgagcaatccacatgactacaggaaaggtccttaggttctcagcaagtatgacagcaatttatagaagacgtttgaatgcccatgtgtcactggtgttaggacctgtattttgtagaccctgagaaacagcctctcggatctatctcatgggtcagtgtgaaggccaattcactgaaggaataaaatgaccagaaacttcctggcacacgaggagtgtgacagcacatcaacatcatggctatgagtcgtgtcctagctgatgaattaatatttcgattctaattcttcagtcagttttaaatttaaaaagataatcgacactaactggatagttagcttttgccaagcagagtgccaggctttatagatgaagaaaatattttttggggggtagcaaatttggatgctgtgtaaatattaacatgggctacctttccctgttgggtacccagagaaggaaggactacagctttgtgagttttttgtttgtttgtttgtttttgtttttaaatgagttgattattaaaaacctggaatgctgccaggtggtggaggttgaggcaaggtggatggatatctgtgagttcaaggccagcctggtctgcagaatgagttcaaagccagtcagggctacacagagaaaccctgtctcagaaaaccaaaaccaaccaatcaaccaagcacacactgcttgctagttgctttggtcctcccagtcctcagctcccgagctgcctctgggcagagaatgtgactttaggcctccacatgctcccttctcactcagacactgctgtttccggaaggcatggacgaggcaccagctcgcagtgctgtcagcctccgggtctcaccctctccacaggtctcacggacagatgtcccctcagcctgtccagtagtcagctgccacttgctgatggcagatgtctgtgtgagaacgccactgtgaatattattgaaactcatcaggaagaagcactgtgggccacactggcctgcctacctttcctcgtgggtatctaaatctggaaaagaattgttcccttgaattcagagaaactaactagtgtttggagcacatatcctttgaattcattgatatgcatgtgtacatgtgttagtgtgtgtgtaaaaacatcaatacttttatatatcatttttaagagaacatggttttaactgaagctaaaaattggactggctttaggatcagtaaaaatccattgggctttctttggtcatgcgatctttctatgagctagaggaattttggagcaggatacatggaagaattcagtgacaaacaggagacatgactgagctactcagcattgcccacttaggtggtctccattcatctacatcctacatcttgtattttcttagtccatccttcccccatcttcctccctgaactgaacccagggctcatacattgtaattctgttacactctagcccatcctgttgtctgaaaataaactccaaacaccttttagaaagattttttatttttatcttatgtccttgagacacatttgtgtatgtctaccatgtgcaagcccgatgctcacagagtcacaggtaggtagttagaagctgccatggctgcttagaactgaacccagttctatgcaaaatcagccagtgcttttaatggctgaaccaacaactctgcagccgccggccaatagtttttacattgtacatttctggttatttccctctgcctctttcgcccttctttttttcttgttttgttatgtcctcctcaattggaggagctgagtcatgtgattcccagtgtgagatattccgtttgagtccctcagcttgttcctcagacctttcaatttgttattaaaacatcattgttgtgtgtctgatgtgtttgtgatctgtggcgtgaatgtggtagagatcacacgtagagatcggagtatagctttgtggagtctgctctctctgtgggtttcagggatggaacttaagtcattactcttcagaacaagttactttaaccgctaaaccatgccaatggcccatctaaagcataattaaaatgaaaaggttgatagtttgatctaatgagttagtaggttctttgcaggctttgattgttgctttgtagacttggggacctggtgtccttcagggccgccattgctgatctctgcagtcttcttcctcggcttccagtttatttttagtacatcttttcacggtcgtcttttttctttaatacagtagcagacagcaaactgtgtctagtagcacgttgctcctaggcagtgtagctgctaacgggatgtgtattcctggacatgagccaagttgtgcttcactctgtgtgtttgtcctcatgctctttattttggtgttggggtgtgagccccaagaacccatgccagccacttacctggctgctgctcgttatgctgggctctgggaatccaggaggacagcagccttctcctgaggaaatcgttactgtgggagagccagttctgttgatggcccacgtgaactgtctcggtgttttggaaatcctttcagcaggattctgtgggcagcatagacatccccctggatgcaggatgcaggatggagagatctggggtttagaggtggagggagcagccctttgaggcccagtgagaccaggacttgtaagggataatgttgaacacagctattgggggtcagctacctgagggcatgaagaactgttttccacacaccatggatgctgtttccataggaacaaggaagcatttccagaattatcacattgaatattctataggccttgaagtgggcatgaggccgtaatatagggtgcccaatagacaggggctctagctagcaagatgaaggatgaacaagatatgtgttggggttgaggtatatgaggtgtgcatggtcacaggggaattaaccgatgtgtaagctgcctaagacccagttgggaggtaaggcctgaagtagaaggagcagatagaggcttccaagtcatatgtggacatggagggtgaacttccctatgtgtttccatgttaaaggagagaagtggatggttggtcagtgtgggctcagtgtgggcacttggaacaaaaggtggagggaccagcttgaagtcactggcctctgtgcctggcttccctcaggccttagctacgtaatgatggaagagagagaaggcttcaccatgcagcagtctttaagctctctgtttctgcaatcagctgtagaaagttcctgcccatcactttagagactgcagcacatgagtgcatatgagggccataaaggagctgtcctatagaaggagggtgttgcaaagcctcttaggaaggtcagcttcccttggtgctgtttcctgtagcggctccctagggtggtgaggggtgtgtgccctttgggaaagaataccttcaatttctttatctggaaacgtgaagtttcttcacagggctcatctcccaggacctgcggtctgccctgggcctgtggagtgtcttcactgccccagtgagatgccataggccaaggagattggtttaactggtggtggcagtttctaaagtagggagacagaggaagcaagagattctggccagggtgacacaggaattaggaagctgctcatttttcctgcactcagaatgttaaagagacagtccccctcccgctgtgcgcgtgggcaacccttgtcccatcatggggcatctccaggtcctccttctcacccccaccccacctcccaaattgctttatgtttcttttcttttcttttcttttcttttcttttcttttctttgtttttgtttttgttctgttttgtgtagccctggctgtcctggaactcactttgtagaccaggctggcctcgaactcagaaatccgccggcctctgcctcccaagtgctgggattaaaggcgtgcaccaccaccgcccggctgctttatgtttccattcctggctctccattgagccgtgaaacctacaggctgctctttgagtgtgtccctgtccatctcctgctgagtcctgtgttgttgtgactgctctcctcctcctcctcctcctcctccatatcccattccctttggtttatagtctgtattcattgttttggtgatggtgccggggcagtacctctctctccactgtgctaacttggctactttttatattgcgttagatattgtaacgctagcataaacatcttgttcctgttgttccataatgatggactggagtgtaaattgccacttcctttgttaagagcactttgctagcatctgtcagtgttcatcctatcaggcctgtgatggattcccactagtggagaatagtgctattgggatatttcacatgaaatatatatgcatagagttgcttactgtaatgctgtaggaagcaaagccgggaaacaacatgaatgtacatcagtatgggtactgtgaagggactgaaagccggctcatctacagaaagcattttccagctgtaaataaagggaaaataatgtaaacgttcaacttgtaatttgtacccagcgaacaactaaggagagatggattattttaaaacataagaagtgtagtacccccgtggaggaaggggaactaggaaggacgccatcttttactcttcatctctatcttttgaaccactccggcttccttccctcccctacaggccttttctttcccagagctagaaaacaagtggcttatgtcctagatcctcattttagcttttccttcactcttttcattgattgtgtggtttcacatgcatccccagtcctgctcggctcctcgatcaccctctgccttctgcccttgcaacctcctccccaaaagcaataaaagataatgccaatatcaatgcctatgcaaacaaacaagcaaacaaacaaaacacaaaacatagaaaacacttcattgtggaagctgtactggtgtcacagtgtgtcccccagtactgcagtgtgtcacagtgtgtccccctctgtacacacatcttcacttgcaaatgttcattgtgatgagttattggtctggcttctgtgacagcatcaatattggatcttccctgggcttcctctgggttctgctgttgctgccctggggcatggagatcctgcagctttgaatcagtaggactggcccttccatgcatcccaacctcttgaagatgatagagattttggggttgccaacacagagccctggatctgggcctgggtggtagttgagctggtcagcatgttggttcttccttatccacagggtgggcactcaagcattgactggtctggctaggccacccagtgccaccattggcaggaggcaggtcagctcttccaactacggggtggaggaatcgcctctgcacctaacccatctcacagcagataagtgaggagtggctgggccagctccactgcactctccactgagacttaaagtaagctggggtcctgctgtgttcagctgaccttgcctcatgttataatatgacagtgtccccaacaaatggagtggtccatctcacgcattcagtcatggactccgattatcagatactcaaaggttctgagtctgtgtcgttggccctgtccatccatgttgtatgtaagcttccagctatttctgattcattatctgaagatgcttcagaacccatcttttgttacgtctgtaggtgggaggagggagcattcagacatcacagaccacattcctgcacttggttcttgtgtactgtggaattgtcgtgagacatttgtttttgaagagccttgactttttatgtggttggcagataaatttattgagtgttcatatgtatatactgccttagaattataaagatggcaatgatttttttcaaatataaatctgtgcttttaaaaatatatgaaatataatgctaaatgtattttcctgatattggcattaccttttattgcttattgagttatgtttagttacttgaggtaacaagtgcttgctgaagagtagcaacagtttagtgaattaagggatagacagacagggccttgctgtgtagtagccctgtctgtctgcttttgaactcacaatcctcttgcctcagcttctgtctttattatggtccctctgcatatgatcttttccttttcatttaacttttattgattctttctgaatttcatgtcatgcaccccagttccctcctctgcctgtcccttcccacccccaccccctttgctcttgcaacctccctgccaagctgtgactgtcacagtgtgttctgcacttccttacatctgcacaggatctttaggagagggctgtcgcccacagttcagtcagcccttacagtcaaacaccacctgcggcagaacaaactctgttcagccaatctcatgaaattggatttttattttattcccaactgtatttagtttctgtggttagaaatagtagttgaaattgtggtggaatctgatggttttgaccatttaaagccttaagagtgacttgcaaggctatggtgtttctgacggtgtttggctgtggcttcctggctgcttgttttataggcacttttgtagttgaagaagggtgggctcccaggcactctgcactctgctgtgggagcagggctttctcattttcttgcccagtgtcaggcaaccctgcacctctctgctgtctctggggcagggtggaggaccttgaatgccgcctcttgccccacttgatttgaaattctggctgctgctctcagggaactttggggcatatagcagggcacacttcgacaagcagaaatctgatttgtgtgtgtggggggagggattaaggtgataataatctaccaactcctactcagcccccacaaaccaaagtgtcaccctcagcaagcagccggattgtagagctgtggctgtggtggttgggtggcaggtgtcactcccacctcctcatgatgtggctcccaggtaaacccaggcaaccacaggggagccagtctggaagggtgggtattagataccacacgaacagactaagggcctggcttgctacagcttcttagttttgttggagatctttctaagagtctgtggaatgctgttctcgggcattcacctttatcttagagccagtttaaagacagcttgcactgacccttggctggtgctggctggtgaaatccagtttgtgtagctcatagatttttcagtaccagctcttggcttaagaagcccaagaatttgtagtgtgttctgtgtgagaatggggtggggcaggtgcttcttagagaattttactaataaacactaatttccatgtactagttaataaactaaaactagtatatggttctttagggcctatgtgagctgcctgagagagggagaacattttacttggtggtaggagtttcccattctttttatttcccctctcccattagaaactggttcttcagctttcagagccaagtaagaagctatgcactaggctcttagcctctggcctctctttggctccagtgagcatgtattaagtagccaagacctgctatgtagggtctgtgaggtggagcagcatttggactgtgtgctgtttcaacagaataccagacctcgcagcctggagagagttgaaggaaaggcaaggctgagtttctcagctctggcaggcaggcaggcaggcaggcaggtgttttgtattttgtccctccacccccactggcttttgttctttaatgtggttttctaaagatgacaccacataggcttgtgggattttccgcacctgggtgttggttggttttctaaaaactcataccgttctgtgggtattgaggagggcattttaagattcagctattaataatgtcattaattattttttaaaattgaaataatatttgaccaaaatcatagttcagctatacaaatgtgtggctcacccctgtaatcccagcacttggaagggtgagctaggaggattataacaaattcaaggccagcctgggctagcactgagacggtccccacacgttggaataattaagcaatatatcccagtttaggattaggtaatacagtgagctttggctttggtttgccctgcatggtgacaactcatttctggtccacaaaactgcagtcccatgatgcagtctcatatccaatgtgcctgctcttatttatttctgtcattgattcatcactgtttgtgcttttgataaagtattaaatgacagctgccacatgtttaattgttggcaaaaatgtaacgtcacttgatatttaatcatggtcagctcttgtttcattttgtctactgtatgaagcctaacacttggagatactgatgaaggattgtgtgtttgtgtttgtctaggacatgtctcaagaaggctatggaactagatctcagcctcctctggcccctggaaaatccaaccatgaagacttgaatttaattcaacaggaaagaccatcgagtctaccagtaagacattactatgctgattggaaaatgtaatgggttaaaggattctgcaaacgattgttttgcctgctctgttttatattacacacaggagagaactttctaagtgtcagatttatttaagaactgttagctgttaggattctttcttgagagccaacactaagctctgagcaaagctaccttggcagtgtccacttctgtagctctcagtcatccagctctccttgctgctgtgtgggtttagatgtactgggatatcaattattgacgaagcttggcatatagcatgtaatgtaaaaattatcctgaagctctccctctgttaggacattagcatttgagtatactctagttttctttgctcatgaagcatgcgtgccaggaaaagacaggctggaaggtctgttacagcaaaccctgtagagtatatactctgttattttgcagatcttgggtgtatctcaatttgtagtgtggtgaagtgcactggcccctgagtgttctgcagacctgtttctcgtaacactcgccaatgctttcatcacagttgctatggttaccttgactccttggtttagaccctgatccttttatataaaacgttttttaaaacccaccactggtttctagctgttcatgttatcacttggggattgttctcaggggattgaattggcctcaagaaagtctgtgtcctttctaggctaatgacaccagctgatggtgtaggtatgacacctacattggcagaacttgtcattctcaaaaccattttgttttcttcacatgtgctttcccatggtggtcttgagtttctagagaagaagtggacaatctgaacagttaggcaaacagtagctcgagggttcttttcttagtaatatacacttttgcttgtgaaaaagtgactgacaaacactaatcattgtaacttgagccacttgaatgcagaatgcatgttcttagtaaaatactaatgagtgtataaaagggagtaattgaaaaaaaaagaaggctctccttttttcttcttcaaaaaaccaatgtctgtcttcttagacgtggagagagccatctctgtgctccagattggaaagagccactttgttgaacctgtccccaaaccccaggtagatgggggtcacagttctttctgcttatccaagctcactgtgcctgccctgctctgatagtacttgggaggaggcacagtggtgggcactggggtagatttgtaaattggctattttggaagttccctcacgtcattaaaacccgattcctgaccccatcttcctcaagcagaaaagtcgggagattgacgtgcaaagagttggattttccacagtcagctaaacagtgctgtgtccctctgtggagttgccctttttgaagggagtggggtactcaaggctgatagttcttacagtagcgggtcttaaaccggacagtagatgccttacagagaatgctgaatacctgttattatccaaaaatacaccttagggataaagtatcagcctgaaagtcctgcctttaaggaaagagtctggtttgtctgtgttcactttagtctttgataacatcagctgttattaggggctgtgcgttttgaaaacgagaacattgctgttaggctaatggtgcagtgcagttaaaatccatgaatttaatactatggttcctttgatgattggaaaccagtgagggaacacagagaagcagtcacttagctgggtcctgatttcctagttttcagcgcagccctaagcctatctcaacctgttggcaggtttctgcagaatttaagtctaccagacgaatggctgctgggtgaactctttggaaagttttttgtttgtagcttgaacttgatttaaatggttgtcatgaaaaggttaagagtgtagctgtcttacattgattgatccttctcaaatcattttaaatgctttaaaaaattacaagttaatgaaagagaaatcttatgtgtcttcacatagctctgagagttcaggcatggttacttcttgttagcagtttgcttagtgttcctaagtgtcagtagccttacactgtcagcagggttacagagttccaggggaggcactgtacagggtgggggctccccagggtaggtggggtcccctaggcagtgtgccctgtgggtggttcctctgccattgtaacttttgcagaaattagccatcattgggccaatttcaaactaaagatatgaacatagttttgatgtcctgggaaactggaaaagggacacatggctttttgtgttttacaatgtaatgttcttactggagaggctaatgtgccacccagacatcgcattccctcagaccgggagagcaggaagagacaccatgactgtccttcctggggtccccatggccctgttggtcatgtcagagcgagaagatagagctgagcaaggcggcaagtgtttgtctcctttcttccaaaacagcatcccacttaaatatggattctgtaaatgaaaattcagttaagacttgaacagtttagacttcttccatgaaaagaaaagcctaaatacaatggaaagcttgaataagggaatattttaaaagaactgtagcctgcttttaaagcactaaaatgcttgtgcacccagtgtttcctgactgacttcttcagtctggtaaaataaatggaaatttctttacctttaactttatttacttggttagtttgggaaagcacccagagccttgtgctcactctgctgtctgttacctaaattcacttccccaaagtagggaggttcaaactcggtgtagccaaggcatttgcttagggacagctcattgactttcaaaaacttgtttcaattttaaaaacagatttctaactaagtttactttctgcaaactttctcatctaacattctgaagatttccgtttaacatgtgggggaaatgaatttcagcccattctgtagggctgtcaattagttcttgaaaagttaacggaggactatgggaatgctgtaaaaatagactggccaagccagaggcttcgaagggctgggacataactgatttgcaggatattggttttgataatagaaggatagtgatgatctatagttgataaatgaagctcattaagtaagggatgataaatgcatacactcctgattaatagaaacatctgcgcacaagatctactctgcttacggctctctgctgacctgggtggggccctggagcctttctgtggcttgacctagctgtccaggatgcaggcatgtcccagagtcacccccacagccctaagccactgtgcctgacatcttctctgaccggcgggtgagttggggatgggaggcagaggaggcagagcaggaacttgagccatcaaccagcctgaagatgaggtggcaggcaggtctctgtgttctgagcatgtgcccagagcctgaacttgagcaggtatgcagagcctcaggacacattacagtggttattttccttccttgtatgaggatctgtgattctcaggacctatcacaccctttcctgctgtcttggttttggccgtggtacccacagggcgagtgccacaccctcgccctgcctccaggccgggtgatgttgtccagtgggacagcaagggtgcttggcttcgtattatcctactttactgggaaatggctctcactttacagattgtcactttgcaggtgatgagaaggcacacatctgtttgctgtaacagggacatgtgaccagcaggcactcacactagcatccgtgcactggttactagtatttatgtttttttggatctagaagtaactattcttaatattaactgtcagtttaagagttggaataaatagaaggttcccccaaccaaaatcttcttttcttttgccacagtgcatatgactttagagcgtgctccgcgcccccccccccctcatctttttctttttgccttctctaaattgttgtaaaataactgaatggtcttgttttcctttgtttgggtcaagaaattttagctgaaaattgttactgtgtgaaagaagattattgactcaacaagccttcaattttccatgaataacactcccacccctagcttcgggtgcacgctgcgcatgcattctattttaaaatacagtctgtaatttaaaacaggcagttggatgccccactgaactttgtttaagcctggaataaaagagagagaaaagctttaagccgcaaaaaggtggctaagcctcctcaactgcttgtctttctaatgcatccatcctgttaaagagcgaagcttgcaggtaatgttgccagctggtgccacagctggtttcgcccagtttcaggctgtgctgtggagatctagtcgcttgtttccaagaccccaggagtgtccattggcactagccagtgtgtatgtgcttacacatatggtagttcaatgcatgtgtgaatattatttctgatattaattagttaattaatttttttcaaggcagggtttttctgtgtagccccggctgtccaggaactcaatctgtagaccagtctggcctcaagcgcagagatcctcctgcctctgccgcttgagttcaatgattaaaggcctgtgccttcaccacctggctctgattctaaatgagtaattttggcaatcatttgttataaggtagctactgttgtgttggtgttatataaaatggctttaggacacaaatgttgaccactggactgtttgctttctgagatttagaaagtgctcgcttggaagtagcgtgcatctttcaccttctcttccttacagaaacgaccaacttgccatgactcgtatggaaggcacgctctgtcaggggacctgcttgtgccagtgtttcgtggcctcagcccagctctgctcttgagtagctaagccatgctgcctcagggtgattgcttctcctctctggaaaatgacttctgtagactgagttgcctcaaaacacccttgatctccttcatggtcactgtaggccttttctgttagtatttaagaaagagcaatagagctgaactctcttccctccttacagagcagagcgtcaggtgcgtgaggtgagtctgcaggaggccctctgtgtggctcctactgcccctcatcctccatcctggtgccctttatatttttgtgaagggaaacatgggctttatttaggaactttggccaccaaagagcctagaccttgtttggccttttattaccagagacatgtagcagctcagaggctcccgctgtgccctgcttatgtgattcgtgtggtagtctttcttgggcaggagtacaggacgtctaggggaaaggcaagtccaggagaaagaagagaagcaagaacacctgtcggtcaccgtctccgcaggcctgctatacagtgcagggtggaaagcggttcaggagcaggctgcaggactcaagtcgtgtgcgctcgtgtgggtgtgcatgtgcgtgtgtgtaggccaagaatgtctccctgcactgggcaaaagggcagccagccttgtgaagcaagacagtctgtgttctctgaactcttcactcctttctaatgttgccaagtttattacatgtgctgttaaagttaccaaataaatactttgtttctacaaagattttagattttgatttgggaagtacagtgagtgtgttaccagtctttctgcttatctttactaatttttgctttctggcatgcgttgcgccatgacatggtgagcatccactgtaaagtaggccagacagagtgagtcacagtccaccaagggaaggtaacagcttcctgctaccccaccctccatctctgtgcactcttcagtgtccctaatgctgtgatgcggacagggtctttcctagtctttatttccccactgctgctgttgcctgcctaggagcagtgccagcccctgctcagcactgggggtcgggttgagcttttgtagttggctgctctggagtaaggctgccgtcaggtagtaacccagcaccttctgaggactgttttcaacaggcttacttgggagcgggcgcttcagtcaaagaattgcatgcactgctaataaaagaagagtcactgccctgggaggggccatgagctggaaagatgcctcccagggctctcagggtttctgtggctggacagcatggccctccccacagagtaatagtaaagccgttagctgttaggtgtcttcgtgggctgtctcactgactttgcttctaggatggcacagtgtgtgtttttaagaaatgtgatcccaggcgtggtggcacactggcacacgcctttaatcccagcactcgggaggcagaggcaggtggatttctgagttcgaggccagcctggtctacagagtgagttccaggacagccagggctacacagagaaaccctgtctcaaaaaacgaaagaaagaaagaaagaaagaaagaaagaaagaaagaaagaaagaaaggaagaaaggaagaaaggaagaaaggaaggaaggaaggaagaaagaaagatgaatgacagcaattttattctccagtggacatagattcctttgcattactcaatttgatatacttttgactgattgactgatttttgcctattttggaagaatatttcttagtttaatttgcttcaaattcctcttccctgaatgaatatatttttcgatgtatgcatttgtggacctagaatataattgtcttttttccttatggagggttcaagtgacagagaacttgattttttttttagcatgaaattttcagaagatgttctcttttagtctgtagaaaaggctaccccgttgagcagcgtgaattcagttgtacatttaaagtcctgcaaaggacatggtgcctgaagagattcttctcaacgctgcagatgtccttgctcttcctggccagggatacagctccacagcggagcagtttctcaccccgttgtacaaggtccaaggttagcgctccatccggactcaggaggggggagagctctccaccccagcccccaccggtgtcttcattctacaccaagcctctgcctgttgttccccaggggaacaggggcctttgctttagacatgcactggtttgggtttagtggactttttttttggttggttggtttttgtttttgtttttgttttatgctgttttaaatgctgttttatgagctaaacccggaacacattatagtctccaaagataattaacaaagcaaaacaggattaatattaaccagtttacatgtgtgcattttatgtatttaatttgattcagattttgtctgctttgagctcaaattcccagatgtggaaatagaaagtggcccgtggtcggctggccgacgcagtagcctcacttcagtccgctgcccatctctggcagctccgcccagctccaggcttcacaggttaccacgtgctgccctgccggcttcacactcacaatggggtgagctccctttgaagtgcaactattttgcccaaatattttttgagtaactccccttgccccttaggcttttcttagcatccctgtatgttgacatcttcaaatagggtacagactcactctcagaaattaaattacatttaacaattaatgattacttcttatgcctaaatgggtgtattagatgtaaaaataacaaaagaaataaattaaagttttaattatttcagtagtttcttatgagtgtcactagtatattattttgagacagggtctggtctcattgtgaagtccaggaccacttaaactcagaggactgcctgcctcagcctctctgctgctgagaggtgtagccatgtgccactgtgccttggttaaaattcgtttttttttttttttttttttttaactataacatcttccattgtaagcagtcaacaggggtacttaatattctttattgctaactaatatctacatacagttctagaattctcctttagcctcgcgattttgctgttttatcgaagtttccactgtttagcagtctaagcaaggctgcagggatgttctgccttaagctctctttggacagtgctgtgacactcctgtgcccatgctggctctagggaggacacggcacacgccctttgggttgagctcctcgtcttcctgtgagctacaggagcaccagctctcttggcagacttcttcagatatcttgattattgttacttggttgactttttaaacataaagacaggctattaaattcctacccatctttgatacattatggtcagtttggggttaatgatttttaactgtgtgttcaagctgaccttggtgatgccatctgtaggtctagctaccgtggattccacagcagggttgtttgaactcaggagttcaagaccaacttgaccaaacatagttaaggttgacaaaacattcatcattcatgcaagtacgttcagtaactttatggcctagagacttcatcttcaaccctttacatgtgtgtgcggcacaacacatacagatcctcactaaaacacgtcagtctatgcgcccccaccccacccccaccccgctttgcactcggagcctggggtccgtggctcaccaggcctttgaagcaggagtgcctctgccgaggcgggcaggtgcactgtgagcctgctgcctcagccctggtccctgacgccaagccccttgtgcatggctgtgtgagttctgcagtatggagcctgctgcgactcctcatttcagtgaggcttgttcacacagaaggaaagatgagacgaatgtagctggagattttatgataaaataaaaattcccacagacttggacttcctcttccttccttgttggactaccaaagccaaagtcatgtttgatcgggagcaactgataaagaggccaaaccctttagggttcacgtcataaactagatctgaggagttgcagacgtaggccaggcaggtggcattccaaagtgtcctgctcatccccgtgcccagtgtggtcttcagatgggagttggtgacagagcagcagttgtgacttgagttcacccttctggcttctacagaaagctctagacagcagatctggaggaagcctgagatggcccctcaggcttgcatgcactttcaagctaggcacccagtgctaccccttaattgaaactgcttgtgttgccaggtgacaaaggactgtaatccccacactcatctctaaaattaaaaaaatcacgcatgtgtgtgctcgcaggtatgtatgttcccctgtgcacatatatacgtgtgcaaatacacttggagagaggggaggaaggatatctgttaatagcaatattaaatggtaaccccatgtatgcggtctctgactcttcatcccagctgtttggatgatgataggtaaagccatcactttggggtatccatggcactcacaccttacggttcctcctccgggttctctgctgttccctcagtttcagttatcagtgtttaacacagagaccccatgaagatctggggaagattacagaggaaatgaacatgactgtctttgaagtggacaaacccctgttctcatttttagtggcagcctctggtgtccttggtgtcctgggcagctcagctctgcttttctgttcagctaaagacctaaggtacatacaacagtcggatgtgaaaggtaccataaagacatttcaccctccagatgctgtatttaatacaaagtgcgatccgacgctctaacctaatgctcaaagtctttttctctatggaagtgtatgaaagcggcttgggtgaattttcttgcagctgtccgttactgctttttgcttgagaattagaaagaaatgtgtttattttgtatggatcagtgggcacctttaatggcaagaagcttgctgtgacaaaggaccgggtctcctgtgaggtttgtattcaggctgtgcttctggaaggacttgagttgacctaaagtcacacattcctatgtaaagaaaagctgttctaagacattacaatttgttgggggtggggtaggatggaaaaacaaacgagcccggataatgatgtgaccgcaaatggaggtccagtttaaggctgcgtcccagctaccatggtaaagagagaaattcaaggttatataatttttaatataaaggcaaaattcgttatatcttagggaacttcaccttctatgattttgtagaaggaaatgttctataaagaaacataaaatgatcctgagaaaataatgaaactgatatggaaatagaggcctgttctgtgcagtaagagccgtgatcccatattatttggaagcttataggggtcttgaatgagaccttccggcccacgtgagtggacagggtcctgagtgaggccttaagtcccgcccacgtgatggacagttgaagtcccgcccacgtgatggacagttgaagtcccgcccacgtgatggacagttgaagggttttctagaactcgattgacttgtttaactgtcaaaattataaatctagcaattgtgttcaaaggagtggtttattgagcccatttttatatttcatggaaacttttaaaa

SEQ ID NO: 138 - DNA, 1092 bp, Mus musculus
tttcttcacagggcagcccgatggacccaatggtgatgaagagacctcagttgtatgggatgggtactcacccccactcccagccacagcagagcagcccatacccaggaggctcctacggtcccccaggtgcacagcggtatccccttggcatgcagggccgggctccaggggccctgggaggcttgcagtacccgcagcagcagatgccaccgcagtacggacagcaagctgtgagtggctactgccagcaaggccagcagccatactacaaccagcagccgcagccctcgcacctcccgccccaggcacagtacctgcagccggcggcggcgcagtcccagcagaggtaccagccacagcaggacatgtctcaagaaggctatggaactagatctcagcctcctctggcccctggaaaatccaaccatgaagacttgaatttaattcaacaggaaagaccatcgagtctaccagtaagacattactatgctgattggaaaatgtaatgggttaaaggattctgcaaacgattgttttgcctgctctgttttatattacacacaggagagaactttctaagtgtcagatttatttaagaactgttagctgttaggattctttcttgagagccaacactaagctctgagcaaagctaccttggcagtgtccacttctgtagctctcagtcatccagctctccttgctgctgtgtgggtttagatgtactgggatatcaattattgacgaagcttggcatatagcatgtaatgtaaaaattatcctgaagctctccctctgttaggacattagcatttgagtatactctagttttctttgctcatgaagcatgcgtgccaggaaaagacaggctggaaggtctgttacagcaaaccctgtagagtatatactctgttattttgcagatcttgggtgtatctcaatttgtagtgtggtgaagtgcactggcccctgagtgttctgcagacctgtttctcgtaacactcgccaatgctttcatcacagttgctatggttaccttgactccttggtttagaccctgatccttttatataaaacgttttttaaaac

SEQ ID NO: 139 - protein, 168 aa, Mus musculus
SSQGSPMDPMVMKRPQLYGMGTHPHSQPQQSSPYPGGSYGPPGAQRYPLGMQGRAPGALGGLQYPQQQMPPQYGQQAVSGYCQQGQQPYYNQQPQPSHLPPQAQYLQPAAAQSQQRYQPQQDMSQEGYGTRSQPPLAPGKSNHEDLNLIQQERPSSLPVRHYYADWKM

SEQ ID NO: 140 - DNA, 145985 bp, Homo sapiens
  misc_feature (1)...(145985): n = A,T,C or G
gtgcaaaggaaatgtgaattttattcttgtgcctttgggagtcccatgtcttattttatgctgtctttgagactctttatagtggagtgaagtgatcatcagaggaaactttttatcctactctagggtctgggaacgtgctccagggaacagggtaattatttataaaggtgaggtatagtaacatcatggcgtggtgtaagaatggctcttgtggagaggtagtatggttgagtgtaaaacacactgggtgtccagtgctcattcaagtccttattgatactattttctttatcatcatggttattattattggcattggaagtttctttctgagaccctgaataggttgatgaccacctccttttgagtagtttttgaagtaacatattataaagtggttatatgctcttggaaaaaattattatgtaaaattgcacttgagtgctagcacttgaggtattaagtgaccagctgcccctgtacaaaaatgaaaaacaactcattttggaaacctcttatctaagtgagtctatgaatcataacagaaaataagaaaaatgcatggttttaagtttgacttttgcgggagtactgcatttgttgaatttgattttaaaatataaaaatagtctccataaaacatttccatctgtaatctagttaagctaatcatgtaaaaagtttctgaattctctacttttctaaagcattcagaagtcttaaaaatgattttaatgaaaatatgaaaattttctactaggatacttgcataatttcatatatatcacccaaaatgtttattcttgtctggtttttacatacatccacaaaatttttgatattcttttactaggaggtggagcttaattcccctcccatgagtgtgggctggacttagtgactcccttcatgagtagagtatggacagggaataaagtaacttaacaatggagaaacctggttgacaccaccttaaccaagtgatcaaggctaacatcaccagtggtgagtcatgttgacatcgtcatgttgacctcgtcctccccgctatggtacgatatgaaggacacttcacttctgtggtattttcccccaaaatctgtaagcccagtctcatcatgagaaaacaccaagacatgcaaatgaaggacattttacaaaatacctgacaagtactcttcaactgtgtcaaggaaagactgggaaactgtcacagaatggaggaggctaaggagacacggcgagtcattgtaacatggatggtgggttgggtcctggaacagaaaagggacataagtggcaaagctggaaaaatatgaatgaagtctctggttaacagtgtcgtagtactgttcattttgcagttttgataaatgtgccatgttatgtgaaatgttgctgttagggaaaccggatgaaggatgtaaaggaactctcagtctgaagtcatttcaaaattgaaagttaaaaagttcagtgaaggatgaagaacaaatacattttttcttatggttcatgtgaatgggtagaatatcaaaataaccaagtttagtaatgttctacaagtaaaacttgcctatttttcatagtagactccacacaatttgtgagttgtgtgtttttctgttaggtttttttgtttgtttgttttgtttttttttcctccaggagatgaggtctcactgtgttgcccaggctggaatgcagaggctattcacaggtacaatagtgtcctacagccttgaactcctgggatcaagcaatattcctgcctaatttttttaaagttgctaatttatttacagttcctataaatcttaatgtttataagcattttactgctatactactgaagaaatgaatgtctccagaaggctcatgcctttttattgtgttatttttagagattctgtgtgctaagcattgtacttctaagataaacagtaaagttgttgtgggtttttttttaccatgagagatggaagtggtggtattgatggcttttctgtcctgaagatttattgtaaactttcagttataaaaacaggaatctgtaggcaaagtctgaatcttatatatttacaggtcttgttagtttgtcaatttactttcaaaagcacatgggtcattaatatttataggttcctacctggcaatgatgtttgggaagcaccaacccataaacccatctctctctcttcctcagtggtattaggtgattttttcctttctaactaaataccttgagagtcatcaccagcagttttggagtagaatatagaattaagagactataatctttaagactgtatgttagtcatagtttttagatactgtcaggctgttttaaggttaaggcatatatctttcaactcatgtttttcattgattctcacatggacctgaaatgagtcagatgactatgtcgatccttaaaattattgcaatctagaaaacatgttgctatttaacccagactagagttactcaggcaattttgttgtcattgtgttatttgtttaattctatataatgctaaaaatatacagattttttaaaaagcactttacagatttattcttaaatagtacctgcaattttaattgtgtttaaagtgttcttagtctcttcgttggcacctattgcaaatttttcctcttctaataatattaagactcactttctggacctctgtggctccctggttcctaaaaatgtaggcccctgttccttggcataagcacgtgaggccatgcgcagcctgcctctgccaggctccggagcctcaccctctctcctgggcatcccaagtgccgcctgtgccgaaatgagcatgccctcccctcactcttcctgccctttgtgcctttgtggattgtcccctctgcttcctgtctctttccctgccaagtgccccttcccaccagctgtcctagagtatcctttactcctggtttggaccccagtccctggacatttacccgtcagtctgtcctcttagcacttactaattcaccctccatcatagaattttctgcacttcattgttgtttgtgtggtttgtctctcttcattgagactcaatgatagaaggacattcaagtgtacaagtccacatatgaatataaaatgtcatccacacgtcaacactgccttctccctttttctccacctcctctcacccatcccacagcaccaactacaaaacttagatagggcttgcttaagggtgactctagtacaaaaatacctttcctcacattattcagtatctcacttttttataaagctttaatttcatcagtacactataatttgttttcaaaacatcattgttcctggaataataaagggccagcagttacgcacacgagtctttttcgtgttttagcactgacatggggcttgacttgtgggtaggaagagtcttaagttcgttggacttaagtatgataaaatcagataaaaagcattttaactggtaggaacaatgaaatgccgctaacaagatgctgttattttctcacgtaagaaaatatgcatagtatctggagcacttagacggcccttgatcagtggtggtatcagttgttgctaaagtcagcattctcgtggccataatcatgagcatttctgaggctggtcctgggagtctaaccaagaagggaaacgttacttccagatgaaggtaaatcccagattctatatacccaaaaaaagcttataaatacattttcgtaccaaattatttttgagttctactgcccatactatgttgagaggtctatttgttgttctttctagtctacgtaactcctgagactgttaatagttgaagagtggagaatctcttcaaaagagcttgaaaactgagactattttaggaaccccttgaggcttgtgcagtggggaagaaagatcccttttatgatgcatatttcatacttgcattgtttaccacttctaagtttaggatggcaacatgttccatatcaggagttttaacccaaggacctttgagaacagcttttattttagatgctgatttttaaataccaaagaaaatgtaaccattacaatgatatttatctaaaatggtatgcctaactcagaattttgcttttgtaaagtgtcaatttagctgattatcctacaaatgtcccccttaaaatgagagttacccataatggaatctttgcctgagaaataacacaaacgtatcaggtgaaagtcatgtcacccaaaagtagttcttggccacccctcttaaagtgaattttggctcattagtttttcttgtgttatctctggcttttgatacggatttttggagcttagaactaattttaaattaacatcaacctttttttccagctgacctcgtacatcttaagggtgtgtactgtacatactgtcacataatgagaaaataaatacatatttggacatgattaaataaaaagcgacacatgtataacttggaaagaggatgctcttaaggcctaacaattagtgcttggcagattttttttccagggattctgtttttctggtgcctttgctttattttttaatgtggtctaagataggaagtctgagcttttaactcatttgctgtctagacaaatgaaagcagcagggactttggtaggtatctggacataaacactattacaacacaggttaatgcaagaaaaagcctttaaacatcatggaaattaaacagtcactgtgagaattttccttttgtgtgtatgtgtctgtcaatttattgactcaattctcatatcaatttcaaggtgtattcatatcacgtgaccaaaaatgatagttgtgaaataagggtggaagatgtgaagtaattttacagtgtgtttctaaagaaccaagaatctaatgacactggatacttgacatccaggatgttaattagaaacagagggctgataattcattgctaagttttaatagctaagtcaatagttttcagtagagcatttatggtaaatatttagaaatatttgcatgtgctggattactttctatagtgtttgcagctgtatttttctgtagagcttataaatttagtgatatttaccgatgaacaatcatatccattttgtctttagcaccgcacttggcacaagaagtcactacccttaagaaggtgagggtgtagttgaagagagaaaaagaaaaagaaaaagtacacggttttatttcattttaatattctaaaaaggagaagagacactacttctgctttttaagataattaagagactttttttgaagaccactgaactggcgttttaacctgtgctttaaacccatgggaagtcacagtgagaaatcattaactgtatcctattaaaatccttaaacaagagacctgaactggtctcattgattgaaatatcttctctatttctgattcagtgtttatcctcatgctctcctggggcacttctgagcaagagatgcccaaatgtgtgcagtgcttggcagctttctatgagcggctgatctaataccatcagctaattgtattgagaaccatagcttagagtattttcatttgctttttaaaaaacccacttatttaattaagcaagggagtaaaattttctgacttattcccagttctctgagaaagtaaagccaccagtattgactgaatttatcctttggtgagctaacttacgctaaattgaataccatcaaaaccaaatatgtcttttgatgtgtagcaagtcgtcatgtagtaatgtaaaatatttttaggaaggatcatgtacaatctgtaggcatgagagagtctttatacttaatatctatttcaattatctgcagattttaaaaaatccttcccatgcatcttctttgtgggatgtcccatctttattccttctgacgctgccctccctgagcctgccccaacatagagaatctgaacatattcatgctgcatgttaatttgtgaatgtttctcttgtcaaagtctgataagattgttattgctttgggtggcatttcattctaagcacagtgaaatctcttgtacttgtcactagggttagaatgaaaattttacatgggcagagagacagtggaaggatgatggttacagagggagagtcattgcagggaactgtcatttaaattaagttttaaagctaaacagcttcatgattttggtttttgaaggcagggattttaaaaaattaatcatcgatagtagaagttaagttatttttggtgtgccagaaagtaatcagtattccgagtgatgtcagttactgaaaacccaacttaatagcaagatttcaccaaatcacatgatgatagcaaaatagtgattttactatgcttgagagcccatgaagtcattgccttgccaatcaccccatcacaaaaagaggactgatttatggaatgccatggggcaggaggactctcctagccccttaaaagagactgcctgcaattacctcacctgccagctttccagcaagataaatggaagcactgtagcttgaaggtgccttgggtagaatgagatgcagtaaggtctctctgttctttacaggcatcatagatctgatagtacttataaaagaagaatagagttggtgccctgctgactaaattgtcctctagaggagtattagttacagagcttctttgttaactaggctgaatacttaaaccactgttgaacttcttttattagcatgttttaagatagctctacatacagataccctaacaatctgcagggcgggaatatttctgtataatttacatataaaagtcgcgtgagtgtgtaacagtaatataataattatatctttttattactcttctgttacactgaggtctagtcagcactgaaattctgatgacacatgaacacgaagaaagccactgtttttatatttttctcttgatacttccttgatcagcttgttgaataacagaaatgtttttgatgcctttgcaacctgagtaaagccctcttaatgcccatccgtgtcactttttaaaccataatatggaattttaagggagaatggggatgaaacttgtaggctgtgcagagaattacaagaacttcaaagtaaaatttcagattttatgatgagagatttgcataaaattatttaactacaatagatgatttttcaaaaattaaatctgatttgtcctttctacgtttaacttcatatatagtatgggattttatatcttgttatctaccaggtttttttttctttagagaaacatgaaaagcctatttcctgcctgatggctgttctctgactgccgcttgtttattggtcattgccgtgtggtgggtactgtcagggcctggatatggaggccatcacccatcctgggtttttatgatcccttcaaaaagagtaagattatatggagttgtcactcagtatttttcagggggatgtagtaacggagtaagttcctgttcctgttaaagcttgtaccagtcatgatgtatggtaaagttatggtgcatttcagctgaggcctgtcctaattcctgtttttcccccaaggaataggcaaaggcagtagggatggtgtgagtacacgtggttctttaaatcaggggtcagcaagctttttccgttaagggccagagagtaaatattttcaactttgcagcccctgtggtctctgtcaagacttctgttgttgagtccagtaatcaagttaaatataaagtttcaccagctgaatatgtacaaaaccatgcatctcacgtgcccttacatttctgctaatcataaggattagcataaatgtttatatacctttgaattctaacaatcggattgaatttacttaattttattttggattttttctggaactgcatctcaccgtgtcacctaggctggagtgcagtggctgctcacaggtacacttgtagctcactgtagccttgaactcctgggctcaagcactcctcctgcctcagcttcccgagtagctgggaccacaggctgtgccatcactccaggcttctgttttggagatttgatgaactttttctaggggtgctgtttgcagtctgctctgttgctgttctgttgtttcccataagcacagtcattggacattgaagattttgtggaatgaagacgttttctgttttacttagaaagatattcttcttagcagaagacattttgtttttctatagcatttctctttttgattaggttctgtcaggtatactttagaatatgatttttaaagagaagttaattatatgctataacagatgcttaccagataaactaaactatccagggtactaggatcctaatcctgagtttgctttgtgacgtttcaggaaaccctgaagagctataaccagctctgatttcccttgcttttttttgtactttctggtctaggtttactcttagaatcttagcattttcctctgccagattctaaagccctattctcagaagtcccagttgcaagcagtgaggtaaaatttaacattgataaaatttagagggtggagatctattaggattgaatatgctttgtaaacagtagcataaccagatatttctgactccattctatagtatgtagtcttcagttatcaggacaagtatcttttatgctgtaactcagccttgagaactcattggcacattgctcggtcagtgatctgggagtccagtcattgcaacggggatgcactgagcacctgctgatgggggcctccatgggagccatggggggcacaccagtgatgcaggctgaagtaaaggctttgtctgcgtcctcttctgctgagggagcagaagacagtttcttcttcctcctctctcatcttccccttttcgtctttagcacctacagtctgtcctcagtaacgtaaccttcaacagtaacttggactctctgagcttccattgttttgtatctgtatcaatggggtttttaatcactgcctcagagagtatggtgataaaatatagatggcattgacggtgaaaaactggtattaaaaagtaagatataacattaggacccatttctgccaacataacttcaaagacatttattttcacaatatcatatataaatacacacattattattttcttttaatggcactttattgtaagaatttctcggccaggcacagtggctcatgccagtaatcccagcactttgggaggctgcggcaggcagattgcctgaggtcaggagttcgagaccagcctggccaacatggtgaaaccccgtctctattaaaaatacaaaaattagccaggtgtggtggcaggtgcctgtaatcccagctactagggaggctgaggcaggagaatcgcttgaacccaggatgcagagcttgcagtgagccaagatcgcgccattacactccagcctgggcgacaagagtgagacttcatcaccccccccccaaaaaaaaaaaaactttctcatcacaaagtttggtcaaaattgtgactgctattacattacaatatcctagtttgaaattcacgtagtccaccaatgtcaaattctgaaaaaaaggactcaaagcctgtagttttttactttatgaagtaatcatttaagaaccagcattccattcctatggtaagtcaccaggcagagtgctgtctgtgttgtgtggcattttgaacaggtctaatggactcggtgctgacagctgaagggcaaactgtatggggatggttttatcaaagagaagtacaactttactcattttttaggagagaggcaagatcttattggttcaacttacaaatgacctcattaaaatctaataaaaagtggccatgcttttttattttgggtgttacccagaaaaccttcatctctgaaggggacgtcattatgattttcaagtcgtcttttgatgagatattcatccaaacgtgtcactctataaatacatcttttcctttcttaggatctgtctggctccattgatgacctccccacgggaacggaagcaactttgagctcagcagtcagtgcatccgggtccacgagcagccaaggggatcagagcaacccggcgcagtcgcctttctccccacatgcgtcccctcatctctccagcatcccggggggcccatctccctctcctgttggctctcctgtaggaagcaaccagtctcgatctggcccaatctctcctgcaagtatcccaggtatttactttcctgacaattattattttactttgtgataaagagagatttcatgttcatcaacagtaactcacattactttactatttaaaacctagtggccacatattaagagtataactgaattctcaccaaggcatacgagagtcccagttcctaaagatattcaacaggtgattataactacccctttaataaaatgaccaattactttgataatttcaatttgcatatttaccttaacttatgccagaaacagggtattatttatcctcttagcatatgttttgtaatgattctgttacatcagagcttctgttgatgagtgccactaaagtgagattgttgatgaggattggccttatttttttgtggttctattcaatacttgccacagcatttattttctaaaacatttctacggtctatacttatcagtgtctgatcacatgcaggcactggtcaaggtggagcatggtcgaggcgttcttactgatacaaactcgtgccttctcttggacacaaggagcccatgttctggttaactctgtgttcatttatttcacttgtcatgcatcgcctctatcttctccctttattatgttctcgaggttatttatttggttatttatttgtcagttacttcatcctcatccagctttcttatatcagacttcatccattcaagtctaccgtacaactagctttcctttatcaccaaaccagataattcattctatccttccaaaatcatgggcgttagttttggtgctttttaacgtttcacctcttttatattaaaaaaaaaaagtgtattgtggaatgtttagaatattacacatatatatctctaaataaaagaacatacatagcacactaattatgaaacatcaactatcaaataaacattcatgaattcaccatccggtttaagaattagagtatcataatgccattgtatctacctgtatatttcttccttatcccaagctctatacctcttcctcacttcaaatatccttttaatcttttttaaaatattgttcttttggtttttgggtttttttctaagaattttattacaaacattcatagagtatatattgttttattaagttcttagctttatggaaatgtattatatttggaatgactataatttatcatccaatatgagacacttttgtgcatgcaaagggctactattaacaattacagtaggatagcggcataagccagaaggtcttgggcaggtcagataatatggtcaacccacttgtagtgtaggctaaaatttgctttttttaactaaacgttacatttctaagattcatctgtaatttgatataggtatacgctcagtgcattttgattaaagcatttcgatgttatctttctttcaaagatatatgtttgtcctcatagtgtttgtaataacctggacttatctgctgcttttaactttttaatgctatgaatactctgtagtctagagtttttaagacagtttttggtgttgagatggtttgtgagatgtcacctacctaaatgttggaaagttatatgtaaaatattgcgttactcaaagagcttactctttcattctaaattgagtcaaaaggactttttctaaaaacctaaatgaaaactttcttgaggtataaagatataatggttttaaattttaaattcctgacatgagtagttaaccatctgaagactttccacatgtctgtccttccaaatggggatttctaaacttgtatattcattgtttggatttgatgcaatacagaagataaaacccaacagaaaagctcacttcgggcgtgtgatcctgggtatcaggtgttacattatatagtattttacagaggaagtagctcagcaaatttaactggcctcagagtctgtggttcagttggtttgcacagggtaaaagctggtgagtgggttatacaccatcacaaaggatgcccattcttcgcagtgactgcagatgcgtgcggacggagagcacaaggatctcactatcatttctccctgctaactcctagaaagctttccactttcttggacacgttatttaaagtgtatagtttgttttttaaacttgtgtcagaaacacttaccaccatattgcttcactgtactattccaagtcagctcctctgtagccgacctctatatggtgcttggtaaagctattcaatgaaatttagtaccgggaggaaattaggcagcaaaagctccaccttttttttggtggcatattcttcaagtaaattcttaactgtctttgctaaatgcaaagctacatggggttagattatataaatatgacaaatagaacatttcttagtatattcgccatggagtaacctcttaaaaaatctgataaacaattttggcatttattcacctttctcccaagtggaattacaaacatttgaacttgatggactttcataattatctgatactagccatataaccttgaagaagcttctaagcctctctgtgcctcagtttctgcatctgtaaagatgataaccccacctcataggggaaatgcaaagattaaatgtgtcactgcacgtgagacaggtacatgcggagcactcagtgcttgttgattcttacgatgttacgttcaccattatggatattattcaaactgagactgtctgtgacaattactgttcagagttgtacagttgatttaggcagcaagtcttctggttcttaatccagtggtgtttttgtgcaattcagaagacatgtatgttgttcccagtaatgacttggtgtgtttgctgaggtagttcggtaggactgctagagctagccatgaaagcataatatattttcacagagttgagctcagttttcttctagaaaaaaaaaaaaagtccacgttcctcttggagtttgagcctgagaaggttaagaggaagaccggaaaacgagagagaatgactgtaccccagagattaacagaatttctactgttgtctctacacatgaaaattttagctgaacacttagcccctgcttctctcagatcataggcaaacatttatgctagaccgcctgcctgccacacagaaaagttaacaatagatgcagtataaaatcctggattattttccctctttttgcctgtgtggaggccacatcagctaactgtgagcagcacttcctgcccagtggtcactgccagggctgctgtaaacacttcaacaggtgctcattgcacagggtctgagtggtgaatgggagttgacatctacctgccctcttgtgggaaggggcaccattttctcattcatacagaggagccaggttaccctcagtaaccttgtcctagaccttgggggagtagtccatggcttgagtccaggtattacccatttctctttgttcccacagctaagccgagggccactcaaatgtcagtttttgataacagttcatccaacattttatatgcagctattttaatggaatttactcaaagctcatgacaggtttttgttggggaaaaaaaatgattgtcttctatttccatttccctccacctaggcaccctgtcctttcgaagtttttaaatcatttccctaagattcatatccttattctctgagaagtattaaatatattaagttatccagcgtgcattatgttatatatttgtgtgatcttggtcataggtaataaaaccacattttggagatgatcataaagttggtctttgctttttgttttatatttactttcacctaaatgcaaatacaccttcctttagagaataatgaggcccatctccctcctccttttcccatctctaatccttatatttaaatggtgtgtatctatacatcagatcccaagttcatatgcagtccaccttcatttggttctgagtctgccagtgaaccatacatgccatgtagagacgacatgctctcccaggcgtgatactcaaactgtcgagctatctgttaggaatttccctttatttttctatatgtagtcttttgttttctttctgtccccttccttcctcttactcccagcaccaacttgtgtttggcctctcttctctcctgttgcttcctgccatatctcatcacctcctctccatgtctcacagactggctctttcaatcattgtctctccaacaagtcattgtaaaatgtgcagctgttatgtagctgatagctgggatgaagtaaagccaaatgttgcaggggattcttcctgatgttgctttcctaggatttgttgaaaaaaaacaatcatttttctccatctctaccctggtaaatgtaattgacagctaatgagaagtatcacagaggtagataaacgaagcccagtaaagcatcccaaatggctgattctgtttcttgcctgttaaactgttcctccacccactgcagatttgccctcctatcttgctgcatcacaaacattgtgagtgtcatgggaaccactactgtgatacactggtacaacactgccccgccacatccctaactcagctgggcttttcctcctgcattctttggagaagcagaatggagattttttatgttaggtagccacatggattctctccctttgtttgcacattcctgggctccagctttgcagctctctatagttagaaggtaaagaattcaggcctgcttgttgactctaaacaagcatttgagaacagaaacacaaacgctgtactctccctccagtgccatcacaaattttcttgttttttacctattctctctcctcttcatactgatgtatttatatttagagacagaaatgaaatagctccatctttgtaattggcagtgtgtattcatatactatacatttaaattaagtagatgtaatgtcaggtacagttaattctgaaatgtgtgatattagacatgatgctgatattctagtaaatgatcccatcacgttgcacttacactgcttcttgggttatatcctagcgtttttcactttggcgttaggagggctgctgggttttggatgtgtattgaacaggtcttgggtcttacgctgggcctgattgcccctaatgcatggtggaagctgactcagcacggcatctgaatgcaccgctgttgccagaagattctgcggatgttaatttcacttgtcttgcctccagagccagccattccagtttactaacaaagcaaaaatgtaaataagccaaacttaaaaattttttattttattggccagaggcttttgtcagcttttcctccatgtgctgtaagcagcggcagtgtttaaatattgagaggagggagctcaccgtgggggtgaggaatggacaggcaggtgttaactgttcatagcctggctacttttgtttataaaactaagctcatctgttttattaatgaagatctaaggatagtaactgaaaattcctgaatagatttttccgcattcttttttaggcattaggcatttggtatttgtactaagtccagtgtaagtagagttaactcactttgatctggcagcagaaggccactgattataatagattagggtcaaaaacacaaaattaggtcttcacgctagcacataatgagtagctgtttgtttcatggctattgttcttcttgcttggtattaggtaagactaatcaaaggcaacatcatcttagctatcatagacagaaacaaaatagagttgcatcaaatatgaaagtagaaccctttttcttttcacatttcgtgcttcgctgtttgaggcgctcacctgccacctggcctctcggcagactacctgctggctggctgggcatgagggatgggtcagggtgccttcagagctgagactgtgaagccgggaggcacaggtcaggaggaatctcactcacattccaggagccaccttcactgctcccatctttttctactgatacctcccctccccttctccctctccagccagctgcgcttcaccctactccagtgatcacctctgcacgtgtgcctcctgcctggggtagccgcctcccgcctggggtagcctcttccaggagcccctccacagtgcacagcatgtggcacctgctaatgtgaactcatacccagtgaataacttcagtctctgtcctttgaaaaggatcacaggtgtgacgagcctgaagaaatcgcttggtcagagctcgtcctcctacgccacaaagcaccaattcctttatagtggagcctaattctctgcagctttatcatggccattcctagagggcgagagatgcatccagcataccaaccagccataatgaatctgtgcccctcaggaaaatctcagacaaaaagcatgagttctagaaagggtggcacgtattggattaaatatggaaaagaactgtttggcagcactggggtgtatttagagctcttctgtgtgagtgctcacccagtcccacccttcagcaagtgagagctaagtagatttctctaccagccgatatagctgcagatacaaacaagaagatattctggtcaaaaaactaattttcttgcttaatttgacattcaaacaagcagaatctggaaggatgctataatgggaaagagaaagatgaatctcagttaggagttagtcatagtccagagtgaacaggaaggattccagtgagaggaaatgatagctcctggtctaatttgtcaagattagtacctatcagatgaacaatggaggatgcaaaccaatgtctctctttcatttaacccatttctcctggagttttaggtctcttagggctcaagcccatcctaagtaaataaactttctactttttaatttggccttaataaaactcagggtaaaaagcatgagtttatttctatatgtaaatggttcttagccagtgtcgtttcgtgatgacattagcagtagaccctctaaaatggcatttcttgtactgacagaaattttttatttgaaagtctgcataatcatcttacctaataatcttatttttaaatatctatcgaatgttcctttttggcttcactggaggtggaaatcctgcaacagcttgttgcaaggaagatgcatgctgcttattggcaagccgaggaggaaaaaaaaaattaacacaaaatgccattgatatatccatgtttttaatctgtggcagcacagaaaaccaattcagcagttctacaaaccaaagagaacttaagccagtatttttttccctgacaaagtaaaatatttggatgttatacaaaactatttccattcccttccaaatgctgcttagcaatagttaagaaagcaaattgtatattttgtctttttgagagacggggttgcatctctgtatggcttagttattggtagcgtgatgtagaacctcccactttaagataacagctttaaaattcaggccaagatcctggttatggaaactcagcaagtccatgggtcatgaatattctcagcgctgtttctagaggacagattccccattgctgtctggtggccaaggcctttgcgtttgaagaactgcctcagtgttctgagctactcttctccttcagaggtcactccacaccccaagtcaggtattctgatgggtggggaatgagtattcttttcttcaaaagcacaaatcttttcaatctttcattccagcaaacttcaaattaagccttttctcctcttctttctcccacatttagaaataagaaaacaatagaaatttatcaaaatacaaattcccacttggttttgctcctctcttaattaaaaaaagttgggcaactcagtttaaattatcctgtcaatttccgttccctttctctattcttctgtgtatgaaaatacaagaaagcctgtgtcaccaaggcaatattatgtgcctttttcttgctctgcaatctcagcagtgactcatgtgttttcatggtgggtctaatggtccactcccacttctccattatttttttgcattgttctctggagaagcacttcagacacctcgttctgtttgttttcactcttgagctgagtaggctgtccctgctctgaacctctgctcagctgagtgtcactgcgtctggattctgcgtgtgctgcctctgtggaaatgctgttggcattgacccgctgccttctcccttcgctgagaatgaagattcagaatggaggggtacaaaagcttttatgaactaattttagcctagaagtaaaaagtttcaaaaatcacttgagtacattttggaaaatggtgggtaaatgaatagtacttagagtcaagatgctcctaaagttgatttcacaaacttctggtatatcaccatgtttcctaaaagagaataagtaacaattgtggaaggaacaaaaccattttatagagagtgttaggtttatttcccagtcttctgataaccctggagccaggattattatgatgtgttgattgattatagccgttaagactcttactaatcagtttcatcacttattctcaattcacacacttgcatctttgatttctcttccataacagggtgatatgggttgtcattgactaatgaagaacagaattggtttcggcatgagacaaacggaatgccttcactaatcctaaaatgcattaatctttcataatccacatctgcatgtttataaatgatataactaggaattgttaatgttgatattctcccttccaaacagaaagtgacatgggagtttgtacttgcaaactgcattaaatacataaagctgaatgccaagagtgtgaccttgctgaggatgccaaatatattacttcatttgatggttttagaaaagtagcatgttgcactttgagtgttggatataccaggagatatcctgtggaaagccaactatcctaattgttccgtttccttcctgccttattttatcattctattctgtcattaattcagcaaagcactgagtgtgtattatgctgcaggcgtagtaagtggggtaaaggcgctgaacataaactgcaaagggtcctgtcctcgtgaaacttaaagtctagtgggaaagacaggaaatacataaataactacatactttattgtcaggtagtcaaggaaaaaaatcaggttacttctttagatagcagtggctagttagggcaggtgtctctcttagaagctgatatttgaacaagagaagtgaaagaagggcaggggcaagccatgtgagcatctgggaaaggagatccaggcagagaacggagcaaactcaaaggccctgagttagtattgtgcttagtgtgctgggcggcgaacaccaggaaatcagtgtagccacagcatagtggtcacgggcaatggagcagaatgtgtgggcagttaggtgagagaggagctaacgactttgtaggttatgattatgatttaggaggtttttttattacttctttttgagaaggagtctcactctgtcttccaggctagagtacagtggcacgatctccactcactacaacctctacctcccaggttcaagcaattctcctacctcagcctcccgagtagctgggactataggcacatgtcaccacgcttggctaatttttatatttttagtagagatggggtttcgccatgttggccaggctggtctcgaactcctgacctctcgaaatctgcccatgttggcctcccaaagtgctaggattacaggcgtgagccaccgcgcctggccgatttaggagtttaagtgtgatgtgatccctctggaaggttgggaaggcaggaaatagcataatcctgtttaggttttaggaggctcactgtggctgctaagtggacagtatactgtaggggaaggtgggagcagagacatcggaggctcctgcagtaaccacgcggagtgttgatggccgcttggatgtgcacatagcgggagtagtggcagaaggagtttggccgaaggaattggtaaatgatggttctgtacagaagacagaggaacacgtttttgaaggggaatcgagagtttggttttaaacatactgtatttgaggttcctactgggcatcctaagggaggttttgaataggaggttggataagatctggactcaggcagtattttggtgggaaaaatgagtgtgtgaggctttagggttcaggatgaggtcccctgggcacccagcctgcctcagcatcacttggagggcttgtgattcagtagttgtggggtggagcccgagagtttgcatttccaataatttctagttctgctgaagctgctggtctgggaagtactggcctagggagtgagtgaaggtcagtgctcctcagcactcgccacacaacatgcctgggaaaggaccggtgctggcccagccctggagatgctgagctaatcggtctgacacggggtattccgtcagtactttcttaaagctctccaggtggttattatgcacagccaaggctgagaatcactgagagaagaattctgaggaaaccctggggtacccaaaaaggtagagactgtgaaaaagaaatgcaagaagaaatgtttctagaatatggaagagagcacccgtgtccaagacaacttagcacttccccagtgctccatgggcgtgcctgagaaggaggcctgtcttcccagttaggagcacatacatttctcacaggaaagttgagggatgattagctcatgtgttaagggcggcatagtgctgaggttttttcccctgatctttctagaactagatttggttcagttgaaagtaatgtcacagaaaaaattcttgtgcaaaaatactgttgtattctcaagtccagttcagttagcagcagacttcctcatttccacaattgttacctgaagttcatttcacatgaaatccaagaatcatgttattttaattctacttgaaaaaaggcaaaaaaaaagtatcacattttaagagaagcgagcctcagtggatatatttttgctgcttgttcgtttttcatgtggcctcagtgccttttcttagaagccgacggaggaactagttgagaattccctgtctctataccactgaccatgactttgcgtcagatctttgtccctagagctgcattaaagaataatgtgatttatcctttctgcctggaacatccatcccactcttcatgcagcccagcaaactcctccttacccttcaagaccccgctaaaggatctttcccttcacgaagtccttgctgacccctgcagccccggagttcagctctccctcagggctgccccagctgcctgagcccctggcgggctgagagcctctttcttctttttgtccccagtgccaagaacagtgcctggcaagtagcgctattcagtaaacatgggccaaattaaagaactcacagttctcttagaaaaatgggaattcaaaaggagagagttctgaaattggtgacttataacctttctcctgtgggcttggagccatctttctgcctttgcatttcaccctccatgggatcattcttttcccctccctcctgaaagcgactccactgtgacagatacctttcacaagtgtgcttgccgaatatttagtccaatctgaaagaagtaatggagagtacttgaggtcgtgctcgagaaccttcctctccacattgccacagtcagaggctctgtggcctgcacagccctccttgtcccctggcactcagcatggagagcttagccgtgcccaggctggcactgcctctggcagagtttactcctgagctgcggggtccctgagggtgcccactgccacccgcctggacctcccagttctagcctcgtgctggagaggtctgctctccccccagcaacctcacaagcccagcactgttaaaaaggagtctggttattgattaatccgggtttcattgtgcaactctatatctcttgaaaaagcacttatttaaacacccaaatgtattaatatgtcatggtgtgaattgtgatagtgaagcaaggtaagcaggtgctggtttccttcaaatatacattgtgaagtgttgatttatcccccttagatcctggagatttcactcaggagcctggggttttttgtttgtttgttttttaagtttttcagaatagtaagtggttttagctgtctcgttctttacttttaaaagtatgagttttatgccaagggtttaaaaatcttaagttttatcatgaaaacaagctgtcattagttagtataatcacaaatgcaatgaaattttaaactctgtaagaaaaagcatattattttagtacataaattgacacttaattctatatctaaatggagaatttatagaaaccatgccacctatagtaccagtgttttatctgttggtctcaactttatacattctgtgttatttccctcaaattccaatatttaattcccaaaccctgtatttttccctccctcttctgacatccagacgcagcataaagatgcccattgattgaccacgtgtgccaccttttggtctggaaaacacggtccctcgtacctacagggcacagcaagcgctcacgtgctatattctcttttaggtgcaaaatgactccaagggagtgagcatccgcatgtggcacttctcatagccaaccacccatgtttacaggcagagttgtcacgaagcgttggaacccagaatgagaaatttgtgacaagagagggtggaggcgagtgaaactttgattaaaggaaagtgccttggctttaaaaaggcctgtctctatccggcagcacagagcagcgatcaagtggaagaaagggagcaggcaggcgcctcagctaatctttctcctgggggcccaggtggacaaattggcaaccctgttcacagctttttttcttctcccctttgtgtcataagaactgctaatcggatccatgctgctgcaactgtggttagttattagcagaataaaagcagatttcttcaaaagaacgggtgggggaaacgactatacaaaattgcaaggttgttagaatctaaaatgcacagcagtcgatttttccccttattctgaattagacgatgaatacaagtctttcatctgtcactatacccatttcttcagaggcagccaaatattaagcttctcaaacaaaaaaggaatcttagaaagaggaaaaatattgaggaggaataagaatgggtgagagaagggaaaaattaggttttgtttttattaatttgccctggtgagagaaatataaaccatccctctatttggtgttctccccgccgcctcttaccttacatcaaagcgaggattcgagagaatggagctggtggctgttcagcattttatgtctggtgttctgcctgaggaaagttcagaacctacctcttttcttacagatagcagagtgctatgaatccggacttcctgggggaaggccgggctagcgatgccatacccaaatgtggagaatagacctttccctccacaagtgggttttcacgtggcccagtagaccttggaattgtatgcctgagctttaaagctattgcaaagggtgtgttttgatgagaatgccagattttcagcatggtagttgatgtacttcaggacatcatggactttcacaggggatgcctcgcagatcctcaagattcccaaagttagaagtggttcctgctttcaaccaaatcacatttttggtcatactgcctatttactattcatgtcttcacatctgaagttaactaaagttgagaagctttccttaaagttccatcttttatttaatggctgttttatccacaaagacacagtttttattcacctccccagagtcggtcctgagtggagtggcaagtgcagtgggacccaggctgagctgtgccagccgccaccctgagagttgtgcctcagtcaaacccaaagcacattatattcccacacctttcaggccacttagcagtcatccagactaaaaatgtctcattttaatgcggagaatcctctgtatgtaaatgttttatgactccagtttattttttttattttttttgagacggagtctcgctctgtcacccaggctggggcgcagtggcatgatctcaggtcgctgcagcttccgcctctcaggtttaagcaattctcctgactcagcctcccaagtagcagggattacaggtgcccaccaccacacatttttgtagagacagggttttatcatgttggccaggctagtctcgaactcctgacctcaagcaatctgcctgccttggcttcctgaagtgctgggattacaagcgtgagccattgcgctgggccaactccagtttatctttaatcaaagctgtgctgacttaaatagttaagtctagaagtccgtgcatcaccatgtatcctctgacttaacttgtcctttgccttgccagagacttttcagtttctttgccccaagttctctgtgggaaggtatctccccaaaagggatctcatgggtattagtgatcagactattaaaccaacttgcaagggtctgtcttaccctcgcacctgtcacagagttatgaggaggacccatgcgaaaaacattgtgtagttttagtatgtttaattaataaaagaaaagttctggtttgaatctatgatagcaggctgggtgagtaacgttttataagttggtctttaagggcttttatgaggacataattcacatagaccacatcatactcacttctgttttctacctgttggctgatcgtcctttatagctaatctatcttcaagcctaggagtgaggtttagaaaaagacttggaacactcagaccacagtagggaggagagttgaaaagcttaatccggcaggtttttgacagtgtattagtttgtttagaataaaggtatatggccctgtgaacggtgcgtgggagctgtcttgttctctcaagttcgggaattggaagtatccttattcccttcatggctcgggagtatccaagtcagatagcctctgaagtgcccatttatctgtatttttaggacctaatgacacatgaatagtctgtaatattttggataaggatttaggaaagtctagccccgttttgaatgaactttcgagctgtatgacatgaaaaggtttatctctcaaagcaggggcttaactccttcaaggtgaggacaccaaattgctgtggttctgtgttctcagttgaaaggtagggaagaacattactttctggtttatactgctctaatctgagataggatttattcacaataaagaattgtgttgacagcctgttcaccaacatcttccccacccctctgccctgatacaggaccttttggtaaagggtgaggtgatcttattagagacagaggcacacacaccccatgctgaacaataggaagtgttataagttcacacccacgcacttcagataaactgttaaccggaaccactaagcggaagcctgagcagattctgtatttcagtagtttgcttggagcatatcgaagttggtgtcagccagcctgcttcttcattctgagaataagtgggatttttttccgttcttgaagcaagtgaaatagaaaacactgaacagaaggatgctatgtctaaataacttgtgggttttctaactcatctaaataaatgcctgagactaggacatttgttgaatgtatggattatcaaaaatgtatttttcatttacaccattaggtattatgcaggtttttaaagaaatgacccatgaaatccttgtgctgtgttgcagagctgtaccatcttaccatactctagcttcttactaactgagataagatgtacagtgatttccacagatgcggagtctaccatgcaaccaaccaatgctgtctcttaacaaaattatattgtcatttatcatggtggaaggaaagatcctgaccagttcttcatgttgcagaaattaaaggagcaactaaatacaacccatagtaagaagttatagtgtaattactagtgggtttggcagaatataagaaatgcatcctccagaagatcggtaaagtcagatggtggcaggtgagacccgtattctactttaaagatttgaaagagagccgatttccatgaggctgtactagaataaagcaacccagtgttttaattttggatgcagcagcagaattgcacagtcagtgggaagcacaagatgaacacgatcatagtagtaatgtatcagtatttggttgctacaatgtgttcttttaatttctcactaaagttaatgacaccaccaagaattcttgatgagtagaagaattaattcaattgctaattgctgaaaaccatgaactatgtattgattttgtagcaccatcccatgggagtaacttgatcatgatagagttatttgcaaagtgactggaagcattcctcatttcttctcagaattcaacaagaaccacaaccagtttaattcacacggacctaagaataggtctgtcttacccttgccactgtcacagagtttatgaagagggcccaagtacttgccactaaacacctcatgatctccatgtattgaggatgattggccaagaaaattatccaaatttccatggtttcacatgtcttttcacattaattataaaaagccaatcttcttgaattactaatcgaagaatataatttaggacattgccctctatatagtgagtactcttttttttttttaacctcatttggtacattcaagctatctctaatttacctgcgaacttgtaagacaaataaatgtatattctagacagtgctctctctttagctccttctttcttcacttttgcccagagtcagctaacgtaggaaaattggaaggatagaatggatctgaggcattaaaaccgaaatcaagtagtgtctgtcattcagactccagatttgctatcttgactaatcatgtcaatattccatctcagataactaaatccatcttaggttagttggctttttagctgtaatgatgtgaaaggaaggaataatttttctatggccactacaacttttgaaacatggaatttctgaatatttctatatctattagtattactaatactggagataatgcagtattatttgaaaaggggtgaatggtttgtttgccagaattggttgtggttcagagttagtgttcttgttctttttctatagttgtatactgtagtaatgtagaaaggaattatccccaaggaattttaacctcaataaaggattaatgtgggaatcctattcacctcatgtttattctctaccatcccaacacaaaagtagtagagtataatttacgcaattgcatctgatcagtagttgatctgatttgttggtttgtttctgatccgaaagagttggaaaaataaaactacaagtaatcatttatctaaacatttacctgctaaatgtacttaccatttaagtcttagacttttgcctgcattaagtgctaaggaacccagcgcattcttacatatagataggagagagcataaagcaacttctgttactgacatttatttatgaagccttcccctttaaatatggaagaatgtgagatttctatgtcagtgctgttgttattaaatactcatctgtattggctttttcagcaagtattcctcctgagtggttcttttttttttttttttttttttttttgagacggagtcttgctctgtcacccaggctggagtacagtggcgcaatctctgcctcccgggttcaagtgattctcctgcctcagcctcctgagtggctgagattacaggtgtacgccaccacgcctggctaatttttatgtacttttagtagagacggggtttcaccatattgaccaggctggcctcaaactcctgacctcgtgatccacccacctcagcctcccaaagtgctgggattacaggtgtgagccactgcacccggccttcctgaatgtttctttactcactcatattatcatttagaacagggatcacaaactacagcctaaggaccaaattcagacaaccacctgttttggcaaataaagttttatttatgctattttgttttcatattgtctgtggctacttttgaactacaacagctgaggtgagtagttggaacagaaaacatatggcctgtgaaacctaaaatgtttactatctggcagtttacagagaaagtttgtctaatcctcatctagaataataagataaaactacatgattacagatgagttacaaagatctaattatctattaatctgagcttggttcctggaatcattagccatacttttttttttcaacaaatacttattgaatggttactatatgcctggttcaagagatataatatagcggggaaccaaacagtctgaattttctgtctgtatggaatgtacattgtagtcagttgagacaatgaacggaattaaattaagaactatggaaagtgttaatactgtgtccagttgtaaaaaatcgtagaacgtggcacttgttagtactgactgccccaccatcttgttctatgaagtatgctgagctataatatattcatgtctcagtccatccactgtacattatacattactggatgtgtgctaatttaccaaaatacacatattagcctctttttcccaattgtgttatatactaaaatcccagagttatgttacttgaatatttaatttggtacttatcttgatttagttcttaaaagctatttttaattggataaaattctcccaaaacttctcctagtgtaagattctaaagaaaatattagcaaacagaatccaacagtacattaagaaaataatgtatcataagtggcatttattccagaaatgcaaagttggttcaatattaacaacttttttttttttttttttttttgagacagaggcttgctctgttgcccaggctggagggcagtaatgtgatctcggctcactgcaacgtccacttcccaggttcaagtgattctcccgcctcagcctcctgagtagctgggattacaggcacctgccaccatgcccggctaattttttgtatttttagtagagacagggtttcaccatgttggccaggctggtctcgaactcctgacctcgtgatccacccgccttggcctcccaaagtgctgggattataggcgtaagccaccacgcccggcctaacaactctgttattaatatataccataaacatacatctggtggggggaaatcctctctgtaacaaaactcaacacccagttatgataaaaacactcaaggaagtagcaatggagagatacaatctcaacatggtaaaatgtatatgctttagtttcacttatggactagggaagctctagaggcatttccactaagatcacaaatgaggcaaggatcatcactatcttcactactgttcagtaatgtactacagatattagccaatgtagttaggcaagagaactcaattaaaggcataaggatgagtgtaggagaaataaaactgtctatttacggatgatataatagtaagcctggaaaaccccggagaatcaatgacaaattagcagtggaagaattcatttaatgcggtagtgagacataaaattaacatacaaaaagcagtagtctttctatacacaaacaataaacagttaaaagacatataatggtgaagagaatcccatttacagtagcaacaaggaagactacgtgcttaggaataaacttaacataaaatatacaaaccctctaggtacctgaaagaaactaaagaagacttaagcaaatgaaagatgtctcttgttcttgggtgggatgaactcagcagtcatgagttctccttgactgattatttcagtccaattgctgtgaaaatattagtgagctattttatatggttggacaggttgatactaaagttcatatagaaaaacatgcaagaaaacttagaaaacactgaaaaagaaaaggtgaggagcactattcttactggacactaaaacatggtataaaaatactggaactgaaaatagtgtgtgctagccagtggaacagaagaggaagtccagagttagaccaaatacatgtgaacatgtattaaatgacaaagatgatatttcaagtcactgggctaagaatggatttttaaataaattgtgttggaatacttggggagccacgtgcaaagagattaagttagatccatcctcacatcaaataaactcaagggagatggaaaaaaaacatgtatgtactcgaagaaaactagggtgaattcctctttaaccttggtgtagagagaatagcttcctaactgtgactcagaatccagaggcaataaaaataaagactgataaatttgacaacattaaaaaaaatttccgctacaaaagacaccgtaagcaaaactaaaagacaactgacaaactaggagaagatattcacaatatataccacagacaaagggctaatatctctaatatatgaagaacccttaaaaattccagggcaaaggattaagaacgtaagcagaaaaataggagaaagacttgaacaaacaattcacaaggaaagatattaaaatggccctaaaatctgaaaaagtagtcaaactcattcagaatcagtaagactggtaattttttatttttaattttttttgagatggagtcttgctctgtcgcccaggctggagtgcagtggtgcaatctcggctcactgcaacctccgcctcccgggttcaagcgattctcctgcctcagcctccccagtagctgtggttacaggcacgcatcaccatacctggctaatttttgtatttttaatagagacggggtttcaccatgttggtcaggctggtcttgaactcctgacttcatgatccgcccgcctcagcctcccaaagtgctgggattacaggggtgaaccatcgtacctggccaagactggtaaaatttttttaaacagcaatacattctattagtgaggttatggagagacaggcctttcaaacattgcttgtagcaatgtaaattggtacaaagtttctagaaggaaatttggaattgtgtaacctttagacccaacaatcccacttcagggaattttccctgaacatagaccccagcaatacaaaaatacatccacaaaagactggaaactgtctaaatgcccatacacaggagagtgttgagtaaactatggagcactcacataaaggggtgctggggagcccaggacagtgtgtccaggacagcgtgaaaaaaaggaaagcccaaagggtgtgccacaaacttaccagcttaaaacaaggcacattcattatctctgttcccctggcagagagttcaggcacctcttagctgctcaggacttacaaggctgcagtcaagatgttgggcagcctgcatcctcatctggaggctcgactagggaacaatctacttccagtttcattcggattgtggcagcttcatctcctagcagttgctggagtgaggtcctgagattctggaggcctctcgttcttgccttagtctcagttcacatcagagaagcctatttcctagaaggcctgaaccctgttgaaatgtcaggcccatacaggatcatctctctccattttgattatttcagagtcagctgattagggagtttaattatatctgcaaaatcctttcacatttgccatctgacatagttgcaggagtgacagcccatcactttcttcacattctttggatagaattacaggttctgctcagtggagaggaggggattactcaccggtgttactcattggaggttactcgagggtgtgtctgccacagtgagtgaagagaaatagtctaataaataaaaaaccaagtgaggaagaagatggctcttctcacaatggaattccagtaactaaatgtggaagaaaaaggggaaatatagaatcaccgttagccgataccactgtaataaatgtaaacaagatcttctaaaggatccagaaattcgtgagtgcaggtttgaggaggcataggatttgcatagtctcaaatatcttccaaaaaatacttaaccaactacaatgggaaaatagattgtactgagaagggtatgacatttttgtggtacacttccccaaattcataacctcattttagggataaaaaatataatcagagcaaataaaatttggcaacattctacaaaataactgaacagtactgttcaaaggtgtcaaggtcacaaaatagaaggaaagactaaagtacctaccagctggaggaggctaagggaaagtcactaaatgaaatgtgggatgatcccagaaaaaagacatgacgcggaaaaatgggtgtaattcaaatgaggtctttaggtaagcttctcttctcggtaattgtattatggttatacaagatgttaacattggaggaggtgggctaaaggatataagggaactccttgcactatttttacaagttttctgtaagtctaaaattaattaaaaataaaaatacgtttttaagaaaatgatagcatagacttaggctgataattttatttcagtaaaagtagaaatgcaggtgacagttctgcacctaaattgtgcacgtggctgtgtgtgttatcattggagaatacagaagtgtgcaatgatggaacttactctaattcatagtatagtgttttccagttgtatttttttccattatgcttacatcataatagacattgctgaggaaagaacacgggggctctctttatttatttttttaagctattttaatgttaaagtgccttcataaagtgggttggttcactgtgcccagcagtatgcgctttaaaaattattaccacactttgtttaagaggttttacttgtgaccaacacatgtcatataaaaatctgtaattttgaaggtgtttattgaattcggttggttcggagggctctgaattttcttctttacatgggccaaggacacaaatgagtcttctgttatcactttctcaaatgcattttctgagtcatcatctgctgtgacgatgtttaaactatgcctgtggaagatcaagttgtttcttagttactgtagttactgaatcatagtaactatgacttagtagttatgaaactatggtagaaagatagggagtaaaggaaaatgaataagatggtttgggtggatctgtatcatgataaagctcttgtatctttaacagaatgaatttggtatgtgaatattctcattgctttaaagagacatctgtcttagaattgtgccacacaaccagaagtgctgcttggctgtggcggtattttatgaatcatgggatgcattacttacagccttttttatttctacttgaaatattgtgcataagagcagtgcctcgggcgtgcactgtctaagccacggtgccctgtgttcacatagaattactgtttgtttttactgtcatgagtctatgaatccagcctgtcatgcagaagtgatcctgataatgtaagcacttactgtcttgctgcagctgattccccagtgacattttaaaaagtcagtatttggctgcagagtgctttaaatttctaaatggactatagattggaggccttagggtatttcataggaagcacatgaccctgcagtgagcacacagcaacttttgtagatctgtagccaagtcggtgaccagtatttacccttgaaattgttttggttcagaatgttaggtgttttttactttacatttaattatttggtactagtactaatttactacaaatgtctgaaaccaaatggatacttaacgaagtctatgctgtttgtccaggtcttttatcccgactagttatggttctaatgtaaaaagcagcttctagtggtgacacagtgcatatttctcagtgtctataaattcaggtctttggttttcacttaatctgaaaatgagagtggcagttacacactcaggaacactcagaaatacataaacaagttttgcattcttctctaaacaaagcctaaacccctgaaaacaattgttttatagtaatattttaacagctatttatacgtgttatctaaactgaaaatcatattcctgatcctctgactgccacagataccccgtgattagacttagtaaggagtgaccgtcctgagagattctgggaccgtgtcctgcctggccacatgggtaacagacccatcttgtagaaccacaagagggttggttgttgtacatcgtcaaataccaggctttgtgctgaatgtgccctgaccttcacggggggcgaattggtgatgatctttaggacactaatttttttctttattatttgtaattcttttgagcaatatgcctgactatgaagcagtgggtctgacggagtcagagcggttagcctgatccagccggggtcccaggaccaccgccccagaggactatgcaatgttctttatgtgtgtgtgtgagtgtatttgtgtttccaatttattgaagcaaagagggagggtagaagataaaatagcatggtcctcatgtcacgagagctagttagtgccttgaggactgtgctaaattcagctgctttttaaattccgttacatttttagtcttagaaatgcatttaaacctctcagccaaaaagtgagttgagatcatcagctacctctgatgatttttaaatttcaaaatctcatctcctgccttcacatgactcattatctctcttttatcagtatagtaagaagtatcttcctttaaataatattctcagattatgacttattaagtatttgctatgttcagagagggattgaaggaatacagataagattcctgtcttaaggagtttacattatatttggaaaagacaaactgagcatacacttaaaactggaaattaaatagatgctattgctgtattagcaataaagatcaaaagagatgcagaataatagtcccttctttagtgatcatgtatactgcattttatagtagtatgttttttgtttcttaatggaggtcttctaagtttatgttaaatctctgactgactaatgatgaagatgttttagaagtctattgatattactgtactgattggatattaccatgagtaattgttggccactctgcatgcctgcccacctggagactcacgtaagagtcaggaggatgagtttggcccagctctcctacgttttcttaaatgcattgcagaagtgtgtgtcaagaaatttcagctacagattgattcatatatgagtttaggaactcattcagtaacaacttttcagcaagtgtttagctaaatatgtttattcatgtttcctctttgtttcccagggaaaagatgaactattacactctgagctatgtctttttttaatggggctataccttttgtgatcataaaaattaaatgtggctgtgtcttggttttgcatgactgcattattaatgcaaagggttcccccatctccactttccctcctgtgttttacaggtagtcagatgcctccgcagccacccgggagccagtcagaatccagttcccatcccgccttgagccagtcaccaatgccacaggaaagaggttcgtctccagttcatgtcttacatgcctatagtgctttcaggcgataaggcgtacgtgagtttgcttacctatgcacctccttatcattaatttttttaaaggatattatgttttcttatcagacggaagaaataaaagcccttccaacaaatatggagaggagggaggatgctttcttgtaggttgggtgaagtgtggtcaaagtacagttcaaggcccaaagaatgtgtgtgtccacatagcaccatgaagcatggttcacatatgactgtagtctggtatttggtctagctgtgtaaaaataactgtgaatgactcaactagggtatcagtcccaatgtgtgtgtgtggcggttggcggtggggggttgtgtgtgttaatactggttattccctgatatttaatagtaagattttaaacccagagcaagaccctgtcttaataaatggtaagatcttagaactggagcagacctaaaagtttctatggcccagtcacctaaagcaactggggagtgtagcggttaggtgtgacttcccttattctcaggagctagttagtgccagtcccagaaaaaaagaatatgggcttttccagaaacctttggagagaagtggccccacatctgccagtgctcttgacctttagctcagtcctgcctgtcatccctgccgtgcatttcttaactgccttgcagagaccttaagcccacccatatttacctctgtcttcattatcccttggagtaggaaagctactcttggtggtggtggtggttttaatccagattggtgtattctggaggtacaagaagcctacctgtgcacccctggtgcggtggcaggtcacttcccttgctgtggggcaaggcttgtctgctccatcccacaacaaacgagagagataccgctgtcctgcactcccctcctctctcacacaggcccagaggccagaagttcccaccttggcagctaatatgtactgggctcctgacccctactgtttataattatttgtatatgagttgtagagatgatgatttgcttctgattagaattatgaggtttaagttattttacatgttacaaactcagcaacatgtttagaaactaatgtcaatgaaaagatagatttgctttctctacatatcatttgtgttgaatgtttcagagggataaaatgaatttttcattttctaataccattacatatatatattataatttaaggtatagtcgataatataatgttttaataatggaatagttcatggtttttaaacttcacagtgtgtgagaatcacctggaggacttgttaaaagagattcctgggccccacccccaagtttccaattcagaaggtttgaattgggacgttttaaacctccatttttggcaagttctcagatactgctgatgccagtggtttgaggaccataccttgagaaccactgccttctaatagtacaataataggtttttgaggtgggagaatcacctgagcccatggaggtcgaggttgcaatgagctgtgatcacaccactgcactccaccctgagcaacagagagtgagaccctgtctcaaaaaaataaaaatagattttaataattgtgtgaatatgtggatttgtttccctaaattctctactgtgacctgctccaaatcatccttttatcccatatcatctctctaaattgcttgatctgtgttaactcctcatatggctctggtcatcttgaaggcattatagaagtttatagtgtactggtgccaagcaagcgtgattcttactaaaatccttttttggttgtgagttgcacctgtgttgtattgttgggtcactgtggggaaaaaggaaattgtcttgcactgggtgcctactcgggtcaggcagagaactgagatgaagattcaccccataaccctgtaacatcactctcactggtacagttctttttattttaacaagtgttaaagggtaaaagttcccttatttgaaagtcttaaaattttaacctttattactaagaagaaaacaaagagaaaccctctcagatccttgaacaatgtctttcccagccctttccaacagatacgtgtttgggaaattgggcaatgtagaaaaccagatgtgaagaacaggacaacaattaggaaacttagctaaatcaaacttttaacttaaattgatccactttcaaggcaaaatctaggctctttagtggtaccactgtatggaaattaccatgttaatatgattattgtttttccttcgattgcctttattatatgtagtgtagtttgggtaactgataccaggtacataacaagctgggtggttataatgaccacttctttttttttttttttggagatggagtttcactcttgttgcccaggctggagtgcaatggcacgatctcagctcactgcaacctctgcctcctgggttcaagcgattcttctgcctcagcctcccaagtagctgagattacaggcatgtgccaccatgcccggctaattttgtgtttttggtagagatgagatttctccatgttggtcaggctggtctccaactcccgacctcaggtgatgtacctgcctaggcctctcaaagtgctgggattacaggcatgagccaccgcacccggccatgaccatttctttcaaatagtaaatataaattatataagttgctaaatgtgaattgatttttatgaatgtgatctctaaacctcctctgaaagactgtgagagacattattatattgttatagtttgttttcacactgctataaagaactactggagactggatcatttatgaagaaaagagatttaactgactcatagtcctgcaggctgtgcagcaggcatggctggggaggcctctggaaacttccagtcatgatggaaggtgaaggcaaatttagcacatcttacatggcaggagcaagaggaagagagcgaaaggggaggtgctacaaacttttaaacaaccatatctcgtgagttctcatgaggtagcactagggggacggtgctaaaccgctagaaaccacccccatgatccaataacctcccaccaggccccacctccaacatttgggtggggacacagttcaacatgagatttgggtggggacacaaagccaagctatatcactgtacattcccttttgtgtgtgtgtgttggttaggcaacaccctgaaaaggaaaactttctattttaaaatgactgttacgttagaagatgctttgccttgcatgagtgaaatttcctccagcactgggtagcaaggctttaaagaaaatggctttattatttattaaaacttaggaagaaatgttagctcctaataacctttgatcaaatgccacctgatcaggtgtctaaatgacagtgactttagtgctttggcacaataatagaaacatctgtttgttggaccatcatttggtatgtaccagcagcatacacaatggaaagcagatctaagaaaactcttactaggaaattccccaaaattcattcccccatattggaaagtaacttaactttgtttatactcttacggttgatatatacctaccttgtttagggaagtgctgaaagaaacaggccaagaaatacattagtgagttagtatctttttttaaaacgagtatatcagactgggcacggtggctcacacctgtaatcccagtatttgggaggttgaggcgggtggatcacttgaggtcaggagttcgagtccagccttaccaacatggtgaaaccccgtctccactaaaaacacaaaacattaaccaggcatggtggtgtgtgcctgtagtcccagctactcaggaggctgaggcaggagaatcgcttgaaccagggaggcggacgttgccgtgagctgagatcacgccactgcactccagcctgggcgacagagcgacactccgtctcaaaaaaaaaaaaaaaaaaaaaaaaaaaaggtatatcatggaaaccatagaccctgatagaaaaggtaatgacattgcttctgtactgctgagtgctgaaataaccacattgaacagttctgtttacacttagtttgttttaataaataagattctgataatatagtaatagtccaccatatacgtactttctttaatgtacccacaggagataacattttctttaatggcacggaatctagaaacacatttgcacagagacaagagatgatggagagtgagagatgatgcaacctacttctctctagaggtgcagttttctgagttctccctccaagtcctcatggggcagtgatgctggcaacactgccttggagcctaagtccccccagtttcaagtagctgaacccttgctctgatctttcttttctacttggtcctgtgttcccgttcaggaagagcatatgttaataaaccatgtaccctgtgtgtcagaggttctgcaaacctctggtgacagcaaggtcagtgaagtgcccagctttcctgacagcagtcctttgtaaacctgcagtccccgtccccaccccatctctttttcggtgcccattttatctggtggttttggtattgagttttgtcacaggacatcagtcacaaatccatttccccacattgtacacagatgaaaataactgtgagtttctacagttgatattttctatgtatagaaggtatttgtgcaagtaaatatggatatggcatcataggttacaaatggagggaaaactttagatatttattgggctctctactctcttacatagtattgcctcctctacatcttctgttttccagtataaaacttgatttagtattgtgctgctggaagttttctttgtttgtttgttttgtttgttttgagacagagtcttgctctgtgacccaggctggagtgcagtggcgcaatctcagctcactgtgagctccgccttccgggttcacgccattctcctgcctcagcctcccgagtagctgggactacaggtgcccgccaccacgcccggctaatttttttgtatttttattagagatggggtttcaccatgttagccaggatggtctcgatctcctgacctcgtgatccgcctgcctctgcctcccaaagtgctgggattgcaggtgtgagccaccgcacccagcggaacttctttttaactaaataaagaaaattagttcagattttttggcctttacttcttcattatgtacatgaattttaaagaaaaacagtaaaaacctcagtttagtattctgttgtaacacatttgccattggtttttattttaaacctctctgtagacctcatatggcaatatacagaaatgttactaaatcaccttgccaaaaaatcaagcagtgtaaattaggccaccaaaggcattggaggaacagttcagataaccttaaaatactgaaatgaatcttacaaaaattgtaggtgaccagttcacatttgttttatccttatttcttaatctttatatgtcttgaaattcaaaaagaaaaataggaaacggcttattaataggttgtcctcttaggaagtcttggaggaaatacggaatagtcatctgagtagataaataagtataataattattaacattaaagttaccacatttttaaccccagtgacacgttaagcttaatgaaactaacaaatgcccttctagtttattggattagcaattaggtgaaaatgctgaaagaaagcttatttatttggacagatgtagagaggtcaaaattaatttttcgaaaaccttctaattgaattcccttttaatttcacagtggtgtctagttaaacattcatgttaatgccggtgattttctgaaggtctgaactagatctggattcccaaaatcaacacaggttatttaaccctttttatctagtaagccagcagggactttcctagtgtaatcccatagtatttgaataattagaaggtcataatgaggatttaattagtccttgagatatgctgaagcagaacccctaggaacttcccctttcggacacagatgcaagcagaatggatgctgctccaggactgtgagccacgaggaaatgtattctgttgctggaggcagttctctggcaccattgtgtggccatcagatcggtgctgaaagcatcttaggtgaaatcttccagaattactgaataacagtccccccaaccttcatttctgcccactttccaacctacacaaggactggcttttcctctccactgttgaaaaagaggagttgtagtcaaagcacgctgtacctgattgaaaattggcttttgctttatcagcgacaccaacattaggtgagctgggcgagttgtgtattttctctatagttctatagagaaaatagataacaaaattttgtgttgttctaagcctctggtattttgtccagccaaacatagagatcttgacagctgtttgtcagcagaatcacaaaaatctcatctttggaatctgatgttcacagaggaatatttatcagtagctacatttttgcaaatacagacagtgccattacccagcaaagtgtgtagcagatggggcatgatcaggcatttcaaggttctttttgcgtactactacaaaaaggtgaatcaaaatttctatacttcaaaagtctgaggtttcaaaattacatattttgtttagactgaatagtcttcattattgaatatttcattattcaatatgtcttcattttttatatgctgcttctgttattaaccccgaatgttaactgccttggtataattttattcctactaattaatggtatattttagcttctttacaaagtctgagtagaattccttatcagatttcgagtcacattctatttgcatagtgcacaccttttggctgcgggcacatctttctcttaccttttcctgcaatcaggggaaaaagaatgaattcagtgtcttcctatgagttcaactgagcttccccagggcctgcatggccctcggtgttcatcccctgccagggacccccatgtcggcagcaggctggggcttcacagatgctcagcagagactgagccaaacaactaaagccatccagctctcacaccctgtcaaagcacaagacaaccgaactagaaaatctttattgtttggaattaagaaagcttacaattttaccaataaatactgtatgtcatttgctgtaacacagtgtttgtccctctgaactcactgttagtattttgagcttacacaagattaaagctactgctgctgctcccccctgcctctgttcttcccagatgcatttccatgactgcacagctgtacttacagtgggtgtcagtatgagccatagcccttgcacctggagcctggcactaaatggattgtgctgagtcccctccccaaccccagccgtgctctttatgacccaggggcatttagatagaaatatgtaaaattttgaaagttttttactgttgtcagctagttttatggtgatatttataccaaaagttattttttaaatgtgaaaattactcttgaatatctgaattgacctaattccttaatattcaagaatagattaacaagtcagtactgaaatgaaggagaccacccggataattgttaaggagttggaagtggggtttgatacttttttctgttttgcaacctacggaaaccgtgttgttcttctttctattggattcccggttgtaagtgtgacagtagatctgcagatgctgagatgtatcataagatatactggttgtcagaaaatattctcttaatctacctttctagttttaaagagtaagtgtatcattttcctaatgtatgctgtgtaagtttatagatcaccccggtagggcatcagcaataatctaccctcacccccagatgcaattaacttagcctccactcttaattgaagatcccttctttgtgatgtgtgaaagatgaaaataaactcaaatgggaggctttatacaaaagagaatatctagacaccactctggaaagctgcttctaatttcttcagcctcagaactctgcctctgtgctagactgtggaccaagccaaagctagtcagtaatgaaggcagtcatggcacaggacttgtgtcaggtttatcattaagttccttttaagccagctatccagaaataggttcatcccaaagctgggaaaacaaatgtcacacacaataggagtccatttatattcattgaggaagcatcagtcgaagttttagaacattttaaaagaagcatattttgttacttttgttatatgcagtaattttttgaattgccaattaaagtgggcttttaatacttaatacttatttgtaattggctcattattcttcattgaaagtatttgagaacatctggatcttaggtaaattcatggatttataacaacactttttcctgttccttttgtgttttttctgtctcagtgaaaaaccgttgtctttttccaaagccaaaaattcggaagccatccttgatgcgtttttctcccccgtctgccccaaactaattagtcaccaagttccaccaactcttccccagtagaggttcccacacaccccttctccatacccactatcaccactctagtccagacacctagttaacctcacagcctcctcgctgttcctcctgtccccagcctcatgcctttgagatcatattccacctcctcagaccggtgagagcatgtcattcctcaccacctatgcctttagtcacttgcctgtgccttggataaaggtgcactgatctgtgcggtcaaggggcctgtccttatccagccccggcctcctttgctggcctccctgtcatcacactgctttctctctcaaacacctgccacactgaacctcttgggatctttatataaactcttctctccaactggaacacttctgcagccatcccacctcagctgcacccccaccacccctgtgggtcttcttacctgtgtactttgtcctgattcttaaggtcctcagcctggctcttagtaggtgcttgagtcagtgtttgttgggtgaacaaatgaaggaagcataaccagtcaccgtgctgcccctatgggccaggcaccctctgaagcagcccagatgtgtacagtgttggtgacccattaacagctgggattacagttgattcacagttgaactctgttccagactccagaactctgcgagtggagggaccgtggccttgtcagtttcagaactccagggcctcatgttttacctgctgcttctcattttaatctgcagggactttggaatcagaagatctgggtttaggtacaagctttatcactaactagttttgtatctttggactatttgtgaaatgaggatcatggatatattgcacaattcaaataagattttgtatctaacagtaaaaactgcaaagcaccgtgaacatagtaaatgtaagatcaggttcagatacctcaggtgagacctgggtcgaaagccttaaaaagtagtttatttgcttctccagggcatagcgacgtacgtactttgtctttttcctcagcactgaagtggacttttgcagctaaaacttaaaggatttgtgtaaggaatgactggatcttctgtccccatctgtcatctgggtgctcagtctgacccctccccggactctcatttgcccagtgataggtggtataagttgcaggaccagtcagtagcggaaaggagtttgtggggtggatggggacagcttagaggttgctgtgcccggctccaagtatcaggctctgtggtagtggggaaggagagggagtcgttttgccagttaacctaatagcacagctggtgtggcgcggggggcctgggttaaagccttgaacgggccattagttcctgtcttcttcaaagtagttcatgttgtgaagagaggaaggcaggcaaataaacactgaacatagttaaatgtaacgagaatatttttttaaatctatttttctctccaaatggagatgtgacacctatttgtgaagagaaatgcctctgcctgtctttctgggtggagacaccacaaaggtggcgtggtatgtaaccgtggcacacacacatggcaaagcagcttttattgaactggcttgaagagacagatgccaacatgaaaatcaattgtccatgtgccaaatgaaaaacgtgcttgcttttcggtggcttctgttgccttggacgtcttgttggtatcctgacaatgctgtagttctctgctagctgacgaggcacctttgatgaagaaattaaatttttctgtaattgattttgtgctttcctgcatgggcctggccacgcacgctttctgtgtttgctgatttctctttcatgggtaggatgaatggtgacttgggtttcatgcttgactctactttttccaacaggatttaaagtttctaatgcttacattgcagaatttgttgtgtcccatgaagaggaaaagaatacacgattggaggctaaacaagatccatgttaaaattcctcccagttttatttccccaaatttcctagttttgctttcactttttatttgactttgtttctaactcagttttgtaacacccttcaaacttagagatatgttttcattggatggtactttaactggacccatccctggcgattttggagctttgacaacattgccctgtttaagttcatggagcttcatcactgtttcctttatgtcgtctacccccaaatatgctttaaggactaagtttacttttaaaattaaatacagtttcattctatttttgaaaatgtctaaagttaggtctctctcttatccagggaagaatttttctgtattcctactatacaaaaatattcattttttccttcttttatatagaagatgtgatttgcttataaggatgtcataaatcagtttctttaattttttttcatctgctaaggtttagaaagcaacattggatctttgctgtaaagattatctcttttacaaataagagaatcatatatagcttttttttttttttttttgctgagacggagtttcactctgtcatccaggctggagtgcagtggcgcgtctctgctcactgcaacctccacctcctgggttcaagcagttctcctgcctcagcctcccgagtagctggaactataggcacatgtcaccacgcccggctaatttttgtatttttagtaaagacagtgtttcaccatgttggccaggctggtcttgaactcctgcaagtgatccacccgcctcagcctccaaaagtgctgggattacaggcgtgagcctctgtgcctggctcgcatatagcattttataaactaggtaaagtctccgctaaccaaaccacagataggacactgctgcagaacacactggaaaggtctggaaaactcacttatctaagaataacacagggacatgttttagaaatgctagtttgtttaccactgggtctcaagcacctatgacaatgactggcttgtcattaggccaactaggccagttttgcaagagggcagtgaagggatttcttgtttttaattgatagaagaaaaatgtctcttggcttagtctttaacacaggtctccgtaatagagattgaagtagcgtttttcctagacttacgcgaacactgcttacattgccatgtaacaagaatggattattggaataggaatttttcactgatgctaatattactattcacaagagaatgcccctaaataaaacagtcctttcaaaatgcagactgaatgactccagggaatatcttggcagcccaccactacccctgtctttagctattagatatacaaaatgtggaattcaaacaattatcaaattgtattagaatccattatctaaattaacaccatgtaacgttgaaatgaacttgaggacaagggattcgcctcttagcatgtggtggaaacgcgcttgcccgggtcgggctcataccctcacacaagctctggggcagcagaacctgccagggcaccatttcctaggccagggtcctgcgtgctctaacttacagctagaaagggaacagtcttctctttttttttgagacagagtctcaccctgtcccaggctagagtacagtggcgtgatctgggctcactgcaacctctgcctcccaggttcaagtgattatcctgcctcagcctcccaagtagctgggattacaggtgtgcaccaccacacccagctaacttttttggtatttttagtagagaccgggtttcaccatgttggccaggctggtcttgaactcctgacctcaggtgatccacccgcctcagcctcccaaagtactgggattacaggcatgagccaccgtgcccggccaggaataggtttcttagttcagactggttttcctttaacccccacaaaaaacctaatgggttgtttcatccattaagacaaatgtttatcaagctactcactgccatgggtgcttgagatcccatggtaaccagaagtcagggcccttctcctcacattgagagtctattcagatactcgatggggattttgagatctttctctgtctctgtctctgtctctctctcaatctttctttctctcccccccgccccccgccccccccccacacacacacaagcaaactctggggaatctgccagatcaggaaggatgtatactgcttcttaggccgcccagagctaatcagtactatagctgttggttgagtggcctaaaactgacaagctgagcttttctgagccaaataacatggtcggccaattatttctggaaccatttatctggaagggcacaggactttctgcatagtgagctaagtgaggcaggatccccctcagctctagctggccttgtagaggaggcgtgggacaggcaggcccagcctggagccaccactccctaggggcagcctcggaaggcgtgccaggaggctcacaggtgtggcattgcacctccagagattaaccaccatccaaggacttgcagcattttctggcttcactgatgaatggtttgtagggaaacctggcaagagaaattagtttggaaacttggagtcaggaaataaatggtggattgcattaaaaataatatgaataatagtagctatcatttattaaacctctagtgtgtgcaagcactgagctgtgtgctttacacattttctcgtttaatcttacaaggtaggctcagttgtcatccacatttttcagaaaaggaaagtgatgctttgcagctactaacgtgcccacagctgctgaactagtaagtggtgaagacacgatttggcccaggcagttggtctgcagagccctcactcctcacagcttcgcagtggctgtggagatggacagggtggatgcgtctgatagacatttaggccatggaaataattgtgctttctggcctagtagactcgtttttcttccttgccttgctgtcagctatcagttgttccttctcacaacagtcctttcttggacagctgtctccttttcctcagaaatgattctttggaaacaccgtgagatgaagaacgaaacaatccaatttattaagccacttttgtaaagtaagagcaaatgggtctgaatgaagatggtttatttttcactaagaccacatgtttttggttctaactctatgccagataccttgcttgggcagatgagaggagagtgtgttttaaagcctccagaacttacagtctggcgagagaaacagttgcacaaaaaacaatagcagtatgctaactgcacggccacagctaacatacgtggtgcttttcatgcttataaaagtgactgctttcctggaagggcaaggaatgtcatggaagatagcactaacagagtcatacagaacaggtgcacatcagctgtatgaaggcaagtggccttctaggcacacctgtaaaaacagctggagcaaaggacacagcacaccatcttgttttttaagctatgcctcccattagtggatctttccatgatatgtaaaatatcagagtgcactgtacataataagggtcaacattgttctggaaaatgtagagtgtatgtgaatagtatatgtaagtatgtaaacatatgcacattggatcatgacataaaatatgtctctaaagtgtggattgttgaaaaaaaaaaaagtttgaaagtggcctcacaaatcaacctctgtgagcctcactgtctttaggttgatttgaagctgaaatgggctaataatgaacaagctgttagcatataatatatgctcattaaagatcagctgctcataggccagggaatggcaccttacctagaacctgagaatgcagatttgctgagtgactggatgtgcagggacttgcaggtctgaagcaacccaggggctacagggagctcagagcctaagtgacagaaccagaatgggagcacctggtgactgcgtgtccagggtagggcggcagactcgtgtgctgggctaagtttggccttcagccagttgaggagtcaagagacagtgaatggtttttgaatgaacacagatatctgcgagatgcagaaggcggttcagtgcccaagtgtaggcaccagccttgggcacaagcagaagattttcttcttagaggaggaaaaccaataagcctcgggcctggctggagatgctcaaagcttagagggcaggaagtcgtcaatgctggcttttcttgtggtgtgggtggtcatttcttgacagttggtagctgggctacagatggtttgaagaagttaaaattctaaaccagccaagtaaaagggtacctcaagtgacctctagactcagctgaatgcaggaactttagtttccaagtccatgccttgggacatccactttggatgacacccactggttgcagtggagcctctcagaagctgtctggccagatttgcccgggtctttcctacacgttgtttaggtctcagctgaaatgtgacttcttcgaggaaaccttccaccatcccagtctaaattgggtcttcccctgatactctcatagcacctgtgctgcttttattctccacgtcacacactgactttgagttatttgtcagatgtctgtgtgtcccgctggaatgttaattccatgagggtagatgttgcctgtgcttggctcattcatgcccctggcacctcgtgaatgaccaagaaatggaagagaaaggaggtgatatttagttgactaagatgttacttttcttgtctcatataaagttataagttgcttcgtaattttagttcattatttttccctattgataggcttttattttctgttcaactaaaatttcagttcctcgagggcaaggatcacatcttttgctttttaaaaaatactctcttattcctaccacagttccgagaatgttagagtaaaataggtgcatgctggtggaagatttgtgtgacattactgtggattgagttaccagtttgatagctcagatagaaccccgcgcagtgactaaagggctcacagaatcactataaaggcaatagtaatgcctttgtatagggttttcatggtggttttcagtttagcagagcatttgtgcatggatttttcttatttgactctcagggtgaatgatcttgtaagccagagcaagatgtgcgttcttcactttacacaaaggagcctgtggacccacacagcgaatgggagacgcagcctctaaacagatctgcttccaaacaaatccatagggggtgtgttgctcctactccactaccttaacttctctctaaggatttttcttttgcttgatttttttttcccctaaagggcagaaagggtagtctggttttaacatcagaagggtatctctgcatttggaatgtggtagtacaagttcggtgactgtatgagcatacagcgcaggactcaaaactaggaaattccctgatcagaaccctggtgcagatttatgttacggatgaatatattaatcatattttcatatgaggtttcgaggaaactttgttttgtatcatgtagataatatctaatttagtgctttgtctaaagtttgaattttcccatgttagatatttacttgggaccctataattccataatacatttagtaattcaatatactttcacaatatataggaaattcattttatattttctgaatttccctaaattcagaaagcgtggtactctaaactcagatggcttatgactagaaaaggtcacaccttttaaagacgcagctgcgttccctcagctgtcaggcttgctattcgcaaactctgttacaagacaccatcttagaagaatgttctgaaaaaagcaagatgcaatcaaacaaatatgtcaccataaataggaagaaaagtcttagttgaaatctgatttcttgggaaacattttaaaatgtatttctttcaaaaataaaaatataacaaaacaagaaaagaactaccttcgaaataaatatacttggaaattgcagacttgatttagatttcttcctaggaaagaaaaacgtttaaaccagaatcatagacacctatagctggaagtgcccctacaactattgagcgcaggtgaggaaactgaggccaaaaaggtgaagtcactggctagaatctgcacagcagacgtggaggccaggatgagatcctcgcccagtgctctcttggttaccatgctacctgtcctgtacccttgtttgaatctataatagtgacaagaactggccgggcatggtgcctcacacctgtaatcccagcattttgggaggctgaggcaggcggatcacaagatcaggagtttgagaccagcctggccaatatggtgaaatcccgtctctattagaaatacaaaaattacgcctgtaatcccagcactttgggaggccgaggtgggcggatcacaaggtcaggagatcgagaccatcctggctaatatggtgaaacccggtctctactaaaaatacaaaaaaaaaaattagccgggcatggtggcaggcgcctgtaatcccagctactcaggaggctgaggcaggagaatcgcttgaactcaggaggtggaagttgcagtgagccaagatcgcgccactgtgccactacactccagcctgggtgacagagtgagactctgtctcaaaaaaaaaaaaaaaaaaaaaaacaaaaattagccaggcatggtggtgcacacctgtagtcccagctattcaggaggctgaggcagaagaatcacttgaacctgggaggcagaggttgcagtgagccaagagtgctccactgcactccagcctaggcgacagagcaagacttcatctcaaaaaaaaaaaaaaaaagctactgcttgttgaaagcttcctgtgagccagcccttttatgcatgtttatctccgttaatcctcactacaaccctatgaggtagatatgattgcccccattttacagatgaggaaactgctaatagacatgcatcgtttctgtatttaggatgaatagaaatacttcatttttagctaacttctgtcttctaattttttatcaatttgtttaggagattatggcaatattcaataacctttaaaaatatccataatggattacttttttagtaggattagctagtgttggcatttaattgtgattttctattatgtgtcatgtacctacctcctaactggtcttctcacgtgtaacctttctcttcctcttcaatcctttcttcatgatgcttattacagtagggttagctttcaaaaatgcaacaggcatggtggcccacacctgtagtcccagctaattgggaggctgaggtaggaaaatcacttgaagccaggagttcgagaccagcctagacaacatagagataccctgtctcaaaaagaaaacaaatgcaagtcaggtcataacacttcctcttacggcagtatatggtctatgccattattacaccaactgaaagaccagcttttcacaggactgcagatacagaggtttgggtgagccatgcagcaattcatctgttaacaggagctgtacctgccagatgaaatacttcatattcaagagagagagcgtgaccaatagaaaaagaggcaaacgatataaacagacatttatagaaaaggaagtaaagacagctgtttaacatgttcacatttactcttgataaccaaaataaaaacacaatcacaaattataaaatatctctgaaagaatacattgaaaaaccatttgcctttggccaggggaactctggcagaagacagggatgtgagaggtacttcccataatacaccctttttaaccctttataatctgtacacagttacccaagtgctggagtaatgtggattccagacatttaaattaaaaacatgtagaaataaaaacttgttcatcccagctggaagcttcatctgaatttataggctatccaagtgaaaagatatttttgggagtttataaaccaaacattaacattataatgtcttaactttttttgtatatcacatcacagattataggacactttgacatattatctcagttgatcctcacaggatccgggactgtggctcagaaaggttatgatttgcttaaagtcacacagcaagctgtattcaatacccactgcagtccatttatttacatatctgtctcccctactagattcagagctcatgacgcaaacaagaccacaatctacgccttccattcccagtccactgccgttagatgatgctggcttagaaaggagtcagggaaatgtgtcagcttcctctttcatggtcttggggaacagggaaaggggtgagtctcaccaaaaatagaaaacaagatttcaggaagctcttttaagtggtgccattgcaaaagtaaataatacaaagaaaaaaatagctttcaagttgtaatttctatgtaaggaggtagattccacacccagttgaactttgtccctaaggtatgggaaattgatactgtgaagcagcctcatttgaattcgctttttaattctacctccttttggaaactccatctcctttttgcaaatgtgattttatgtgaaatgccagtgacaattgagatagttcaagtggaacactacatatgtatttttaaggactgagtaaatagaaaaagaaataccttgcctaggtaagaattcttagcactcatttgaacaaaccttaagcctataatgagtgtcacagaggccacaaaaacttaagagtatcgtatactgctgggcgcagtggtttacacctgttatcccagcactgtgggaggctgaggcagacagatcatttgaggtcaggcgttcgagaccagcctggccaacatggtgaaaccccgtctctactaaaagtacaaaaatcagctgggcatgatggcatgcacctgtaatcctagctactcaggaggctgaggcaggagaatcacttgaggttgggaggtggaggttgtagtgagatgagatcgtgccactgcactccagcctgggtgacagagtaagactccatctcaaaaaaaaaaaaagaatatagtatattatcagagcttccaaaccctttggcatggacaccttcatggttggagtgaaatttaatgctaattaaagggcctgtgttattttccttaactaaggaagaaaaagcaatcgttcttttcaaagaaagtaaggggagacccacatgatctctatgaaattgaaacacatttttttattaaacaggactctatctgaaacacttgagaattttatagtaaagcttagataaatatttcatgtaacatcttaagatgcaatcattcatagtaattttagtgctctgatttctgtttgttttcagattgaataagcaaatgttttctatgatggtttatatctggaagctgccaattgagcccaatttcataaggcttatctttataaataagttaaataggataataagaaatagttcaacttacttttattttatgtctatctctttaaacagaagcaatgttagactatatctctttttttaattgaaatgtaaactgtggccacctttgtaaatacaatatgccatttaacctccttaagccaaacttagatctgggattatcttaccctccagctgcctcagtggattttctttcgaagctactgctttaggttctcctgaagcagaaacctgcccgtctccagctagagccttcacctggtaacgtgggcccctctcccgaacataaaaccctgtgttctgagagttgtttttcaaactgtcctttgttagtgtgctagatggataatgtcagctttttctcaaatctatcttgatttggggtcctctttgtcctaatgagtatttcacagctccatctatgaactcgcttccatttgcctggactcctgagagtggaggtacctggccttccagtgatgcataaagatgtgttttctttatccatttgaatcatctacccaccaagcacctatgtgtcgtactcagcactctgttggccgcatgaagaatttaacatccattcatttttttaaaaagcaatagttttgttaaccaccacgtcccacacgctctgctaggcaccaaggatagtgaacccaggtgtgattcttgccctcatggagctaatgttttagtggggaagagagatgataagtgagtcaaaataaaataaagtgattaccagtgattatgaaaagtgctatgaaggaaggtgagtgggaaagggcaagggttggtgtgacctctgatcaggtgtcgagggagggctgagggatgagaaggacccagcagtgtggagagcagatcgtgggcgagccgggaggagggaacgggggagagaggctttgctgagggaaggagcacgatgttgtcttctaggaactctgggacctgcagtgcagtggagggggagaaagctctaggaaatggggctgaagggagaaaggcagcagccagagctcacgaggtctcacagacagggtcacgtgtgcattttattctagcgccagtgggaagccttgatgatgttttgttttgttttgttttgtttgagatggaatctcactgtatggcccaggctggagtgcaggggtgccatctcagctcactgcaacctctgccttctgagttcaagcgattctcctgcctcagcctcctgagtagctgggattacaggcacctgccaccgtgcccggctaatttttgtatttttagtagagacagggtttcaccatcttggccaggctggtcttgaactcctgtcctcgtgatccacccacctcgacctcccagagagctgggattacaggcatgagcctccacgcccagccagccttgatgagttttatgcaggggagagatatgctctcatttccttttatattcctgaaagttattctggcacctttgaggaaaatgaaccaaaaggagcaagactggggttagcaaggctgagtggtcggtggtacagctgtggtgtgggcaggagaagacacaactggggctggctttggtagaagtagaaataaggaagaagtaccatgcacgatctatgtcggagcggagtcaccaggatgtgctgatggatggatcacacttagaggaaagaaggaaagggtggccttgtgggcgtcccatgtgtctgagggagcatttggaggagtggcagtaccagttacagaggtagataagtctcaagacccaacaggtttgaaggagaaagtcagaggttctgctggggcgcagcagaatacagcgcaagcctgcagttgttggcagttgacctgtaaggggtagtgccgagtcaggtattcagaagtctgcaggctctttaggagccaagtttaatggttactgcttgaggacaccagaggggagaaaaacagctctgtgcagggaagagctggtaccctgggtctgacgagtgggatctttgaccagagagctgcatcccacagattgggcagggagcaaaggcttggagcaggcacgcacggcatggccagcctttcaggggcagagggtttgcagtacagcagtcggtcactgttgctttttgtagggattttatctgcaagagaggttaaggtcatttgccttttctcctccttctcccctccctaattgaagtccacaagccattggcttcctgggaatcctcttgggaattcagggttaggaccagggtttcaccagggcaccctccagaccgtccacgctgaactgagatgtctttagctattttttaggagaatcttatggtaccagccttctcccctgccacctgccacatcagtccatgtccatttttatgtatgcagagattatgaaacacctgcatttatatgtttccatttatttcccacttaggttttatggcaggcacacaaagaaaccctcagatggctcagtatggacctcaacagacaggaccatccatgtcgcctcatccttctcctgggggccagatgcatgctggaatcagtagctttcagcagagtaactcaagtgggacttacggtccacagatgagccagtatggaccacaaggtaaaaccaaagcttctccaaaatgcatggcagcaagttgtagaaattttcttaatgtgctagtccttcaagattttaatattgtaaacatatcgtaagatccattatctgttacctgacaggtttgtgaggttcatacaagcccacagtactttagctgcccataatgatgggaggaataattacagccactattggtgaaacatttatgtatcagacacttgggtaggtgctcatcatccttgtgttactagtgaagtaggggacccctatcttctgtgacgtggttctaaacgtagagaaaaagacacaagccacgttctcaggtttctgatgtcaaacttgggctttgttgggttggattctggtttggcccatccctcttagtgatcaccgtcaaaaccctgagctgacggctcaggacggcattgccccgcacatccctcccagtttctctccgaggtgccgcatcaggtcagcagtagttctcactttcccagtcaaccccagtgtgactcttcggagacaggacaaagcctgaaatggttacatgtctttcacaagagaagataagggaggagcagagaactagtggaatcatgtccagcatgcaccattggccttcctccttcctggaagtggatgtaggttttgtcagatacacacagcatccttttatcaaggtttttaacctgatgtgtgtaggtatacatatatatatgttttttctaagtcacttttagcaataagacatttgaatttaccaccttccttatattttgtttatttaaattagacatgagtggataatttagagagaatgagataatctggcacaattcccagagttctctcacttctgaaaataccaggaacattccaggtgaagatgatgagtgccactgggaaactgtagtaaaatgtttaccacttctacaacaaaaccaggtttgcctggtgtagcgccttagtatttcctagaggccaggcaaatagaaggtgaggcccagtcacctttttacctgctggttctcagaaaatcgcatctttctgatgtatagtactttacagcttgaaaagcgagttattatcttgtgttctgaagatgtttttccgaaagatcttaaacagtttcagtgctaccaatggagcattgtttctttgccttagagggctttgttatatttactttccaaatatttctgttggtaggaagactatggggatacccaagaaagcaaacgtctgtatagagcctctcctgcctttgttctaggcttgtcctgagagtgagacttggtgttttgcccaattctctttatatcacatcatcaagagttttccatgttagtaattccagtaagcgttaggaatttcagtcccagttgacagtaatggtctgcttgttccctgtcagtgcccggtaactatgacatgtagcagtttgttgcagagcagaggcaggactgtgggtcacccaccatccttactgaacgtggtgggtgtcgtcaaagccaggtttctttagctgtcatggaaagaagagagcttagtggcagttggaaaaacggtttgtaacttgtggtaggcacagaaaatgcgggcttttgctcctaatgtaattggaagcaagatgcagaccttgttctcagaattgggtgtggctgaaggtctaggagttaactcttaagtccataagcccttcctggactctgaaatttgtctccatactctcaagtaattcaatcttgtagcctctttttctactcatcatatgtgaagactgagccttgggctatctagtaagtcttttgtgaacaactaaggaagaacttttgctataggaattaatagcagggaaggaaattactatagaatggatttttttttttttttactaaatccctgtttttcagtatcattgaatgtgaagactcttaatttaagagcactaagcccaggagagttcttatccaaactgctgtgtctccttggaaaactgcttactctttctgaagttctttttgtctagaaaatgagaaaatgagattatattatgttggcatttgcttccacttctaatgttctacgaataaagccttgcttcagttccaggacctttactgttacggtagcccactgggttcctgcatcacagttcagctttttgtttgagtgttttaaggcatgaaccttgagtgtaggttaatagtagaaacgatctgaaatgagaatgaatattcccacactcagcactctctggtgcctgaaagttgggcacccctcccagcaccatgcacccttttctcctctcctgagtgacactgccaccttgttcccctccaaggcatatgtgctcctgggttcctgcatcagctcggagcgctgtgtgctgtgagggtcctggtactctcaatgtccaaatcaaaatcatcaccttttccgccttggagcctcctgtcctcagcaaacactcagcaacaggagatcacatttgcaatgtgttgttgagttcaataaatactcttcactttttctgtctttgttatccttttagaaagggatcctaataaagggttttttttctttctcctcttgattaactactcagattattagtgacatattcagcttccttctttgcattagaagtgttcatatctctggaatgattcactcatgcagccacccaagatgtcatcagtctcctttttctgtttttgttcttaacttcatggcttgcttctggttttgcttttttaaagaagtttcaaatatttcacagccgttttactcatattttatatgagaagcttttccaaaattgttagtaataacaaccagcatttattgaacatgttactatgtcctgggtcctattttctaagtgttttttatatattaactcatttaatcgtcacagaagttgctgttattactccactttacagaggaagaaactgaggcacagaacaggtgaatagttttgcctggatgcacagtgactacaatggtcaagccaggatccaaacccaggctgattcacccattctcttaattaacgggaagccctctgaggctgtctctattttgtaaatgagaacaccaaagccttgagaaatttaataattcggccatgatcccacagctgttacagtaagtggctgggccagggttcccaccagcagaaactgacttacgaggggcctctcgcgtggtcattggcggtgttgcttcccacacctgagctgcactgccttctcaccggttcattcattcagtaagccactagggatataaaaccaaaatgacaaataacttgcctttaaggagcaagaaacaggcatggaaacatatatataaaaaattactggttgggcatggtggctcaagcctgtaatcccagcactttgggagtccgagacgggtggatcacttgaggtcaggagttcgagaccagcctgggcaacatggtgaaacactgcctctactaaaagtacaaaacttagccgggtgcggtggcacacgcctgtggtcccagctacttgggaggctgaggcacaagaatcgcttgaacccgggacgtggaggctgcagtgagccgagatcatgccactgtactccagcctgggtgacagagtgagaccctgtctttaaaaaaacaacaacaacaacaaaaatactaaagagattaagaatgttgctcatgcccataatctcagcactttgagaggctgaggcaggccgatcgcttgagcccaggagtttgagaccagcctgggcaacatggtagaaccccatctctacaaaaagatataaaaaaattagccagttgtgatggcacacacatgtagtcccagccacgcgggaggctgacatcagaggatcacttgagcccaggaggttgaggctgcagtgagctctgatcacaccactgctctacagcctgggtggcaaagtgagaccctgtcgcaaaaaataaaataaaataaaatttctatgatgtgaagaagggggaatgttagaaatgtatattagtactataaaatctgaatttttaaataaatgaagccaatataaatgtgtaaaaatacttaattacagtatattttatgaaatagcactttgccaccttcaagcaagcacatgtaataataactacccttgcaaagtgtttgcaaggaaagaggactgtggggacttgctttaataagtagaaaggattatgtaattaacatgttaattattaataagtgagtttgtatgggaaaaagagagctaaaatcaatttcatgtccatagcctttttatttcttaaggacaaaactatcttgtttgttttttgtgttctctagaggaatgtctatcacactgactatccagaaatactttttgcatgttgttattagttacaaaatataaacactcgggccttagttttgctgtgagtaagtagagttaccttgggcaagtaacagtagttctgagtctagattgctcccaggcctcactcactctgtaatagcctatgggagtctgggaagggccaccacacacagccatatgggtcgtgctgacacctgggtttatgcctgatttttattgtgtgtgtcttagaaagcagaggacttacaagtaggtgtaaattatttctaaattactttggtaaaggtgtttttcagaagggtttaaagattttttttttcactaaaataaattagatgccatctagaaattttccttttcccttcattcattatatgtgtctcataagttcaacaaaggcaaactttaaatgatattcagttgaaatgaatacagttccaaactactgaattacacagcaatactcttaaattgtggttctagaggggcaaggtctagatgtcaagagttgtggggcccctggctacttgtgggtaccttgtaggccctgcagtcactgagacccaggatttcagtctctactcttctaagttcagaacctccatctttggttggttggttggttggttggttggttggttggttggttagttggttgttgagacagagtctcactctgtcacccaggctggagtgcagtgatgcaaccttgactcactgcaacctcgagctcttgggctaaagggattctcccacctcagcctctctagtagctgggaccacagacatgcaccccacgccgggctaattttttttgtattttttgtagagacaaggtttcagcatgttgcccaagctagtttcaaactcctgggctcacatgatccacccacctcggcctcccaaagtgctaggattacaggcatgagagaaccttggtcttattattgaattggcttaaatgcagctgctcttctgcagatgtggggtctgtctgccacatagattcattctgtgcagtcaaaagacttcccctggatggtgatgcagattgacaagatcctcttctctgacgttccaaagactagattctgtgcaggtcactcgcccttcagtgtgctcattttattgttttcttcaaacaggttgatgcacttgataaggccacagcttcttcttatcttaaccttgttttttggttaaatcgacagtgcaaagcaaaaggattaattccttcttctatactgttatgttttactaaggaaatatactaaatctgttttgctaatattagaaaaaacaaaaattgaattggattatttcatagcaaaggataggtgaacgtaatcaagtcttcttgtgatgcctgaatctagccttcaagttataagacgtaagcgtgaatttttcttagactgataatcatcatgattttgataagatcatcacatcatgatcttaacaaaacctgggaattagggagaaaaaggaaaatatacagtacaaatcaacttaaaatgaaaaaagaaaaaaatcaagcaactttaattttgactcttgtgaggctaattgttttactgcagtaattaacatcagcagtacttaagaggggcacacctcctgccctcaccgtgtgaccgagcgcaccaccgtacgcaccatgtcaggtgggcttcattaagacagcggtgggtggcacctagagaggcagggtgtggacatgcagcttcacttgccctcttagcaaggtaccttttcccgaggtccatcgctcttccatttattcgaatgtttaaaaggaaattacctgttgacacatttcacaaatctgtcagagctgcaccaggcaccctggagaagggtccctccacctgtggttagcggcagccgatcgggaccctccctggcccgcctgcagggggtgcctttcccctgcagtctgtgtggggcatgcagtgcacagcagctgagcctggagacacagcctctggagtgtgcttctgatggttagacgcattcggttcttaccatagagacttgactgttcacactgcagttgactattgggttgggttaatagctatatatatatatattaaactatatatagagagagctatatatataattattattttttttttttgaagatggagttttgctgtgttgcccaggctggggtgcagtggtgcaatctcagctcactgcaacctctgcctcctgggttcaagcaattttcctgcatcagcctctggggtagctaggattacaggcgcccaccaccatacccagctaatttttcatatttttagtagaggcaggttttcaccatgttggccaagctggcctcaaattcctgacctcaagtgattcacccgcctcagcctcccaaagtgctgggattacaggtatgagccaccgtgcccagcctttttatatattttttaatgtcagtgcttaccttttatacattctatttaaggaataaattgcgtatctgtgcgtgatgaaagtaaaactagggatatagtgcaatatgatgatgtaaagatagtttctcttcactaattataaagttattagaacactttttgggccaggtgcagtggctcacgcctgtaatcccagcactttgggaggctgaggtgggtggattgcttaagtctaggagtttgagaccagcctgggcaacacagtgaaaccccatctctattaaaaatacaaatattagcctaatgtggtggcacgcgcctgtaatcccagctactcaggaggctgaggcaggagaattacttgaacccgggaggcggaggttgcagtgagccgagatcacactactacactccagcctgggcgacagagtgagaccttgtctcgataaaaataaaaagaacactttttgcctattccttggctgattttatctattcattgtcagttgtccaaccatagttactatatttttttccctgcagcaaccacatgagacagagaatcttttattgtaccctttttatagaggaagaaactgagctttggagtaacacgtagctttccagaggtcacctgcccagaaccagatggcgagacccacctcctgggaggcctttcttcttcacttgctgcctcgatgtcagatgctggcctctgagcatacccacgtgtccttggggtccgcctctgacgttagccctggtccgggatccgcttctgccccgggagaggcagcggccttccacatggctcccttcccctcagcactctgcagagtcctccctcctgtgtttctcatcatcactctcgtcacctcatgacatgttcttgatttctttacttgcctgtttcctgccaccaggacataagctcttgtcttcattcactgctgaatccccagcatttagcacagagcctggcatgtaagaggcccttaataactctttcttaaatgaatgaattttgctaaggcagagtaatccagagtcactgatactccgtcccctcctgccttgaagcttgaccagtattgggttgaccattcgatgcctaagagcagtacctggtatattatccttgtggagtgagactaaggataatttttgtctgtttctgtgcttccatattttctgcattgagcgtgcattactttgtaattaaaaaggaagacaataattgttgtaacataaatggaaaaaaactaccaaaagtgaaacattgaagtgacactgtaaggtaagataataggtctttctccttcttttacacactttgtgtaatattgtaagttttacattttaaagaattttaaaatgcatattgacctaagagaaatatggtaccttatgtatagttcagaaaacaaattctctctatttattcccacaaataggatttaatgcaacttgcggtaagtcagctttcattttgatgaacctgtatttgtgatcatctacttgatgcatttctctggctgaaagagcagcattgtgtgatagatctaagtagaaagatagaattgaaagaagctgtattgaaatagaactttatttttcacagaaaagatcttacttaaatatgataaccagcaaataaacacatggaaaatcctcaaaatttttttcattagggaaatgaaaactaaagccacgttgatttctattacatactgattcgaatggctaatttttttaagttggaatatcaagtgctggcagttagaactctcacacagtatttgatgggaatatatacaaaatagtacagccacagtttggcagtttcttataaacacgtacttaccatacagccagcaatctaatttctagggttttaccaagaaagatgaaacatattcctaccacacaaagacctgtatacaaatttttagcagctctactcgtaattgccaaaaactggaaaccatatccaagaatggactactactcagcactgaaagggaatgtacagatgcatgcaacggtgtggatggatgtcaaaggcataatgctaagaagccagccacgaaagcctatactgtgtgactccatgtgacgttgtagagaaataaaatgacatgaacggaaatcagatcagtggttgccagggggtggcatggggataaggttgacttatagaaggggaagagggaacttttccctcctttcatttcttgtgagagaaatattctgtaccttgattgtgctgtcgattacaggattatagaattttttatatctcaatatagacatgacaaagccgggcacattggctcacgcctgtaatcacagcactttgggaggcccgcgcgggtatattgtttgaggccaggtgtttgagactagcccgggcaacatgacaaaaccctgtgtctactaaaaatacaaaaattgccctagcatggtagtacacacctgtaaacccagctacttaggaggctcaagtgggaggatcgcttaaactcaggaggcagaggttgcagtgagccgggatcacgtcactgcactccagcctggatgacagagcaagactctgtctcaaaaacaacaacaataacaaaaacaacaacaaaaaaaacaatattttgtagtaactgttataaaaatggtaaacatcactggctacaaaacaagataaatgcatatttagccctaattcacaactgcctttatcatagtatgtagctaattatgcatttcttttttccacaagggtaagatttctgatttattgcattcacctccattttctcctccatcatatagggaatgacgcagaaccttgcccatagtagttgttcataactgttgagtgattggaacttagaagcaaaatttcgtatatgagtggaaacatttagtagtttacaaaaagcagtaagctctgagtatgcattgcaactatcaactttaaatattctggagtcaggtatagaaatttttgtgatctgcctgaaatgatgatggtgacttgaatagggtctagcttctgcttcctctctctggtgcttgaatggaactcctggtgggtagaaatctgaattcatttggtgaccaattttccaaagctagtgtgccaagatgaacccacttgaaaactgtgggtccttggacttggctgcaagaccagtccagctgaggtgggctggcccagcatctgccgccttcattgtgcttaatgctggatccatctgttttctgtcaaagccagtgccaacaaattactaacctattagagaaacatggaaataagattgcacttctcattcctggcttttcctctcatattttgcttggcttacatatttggtttttgtttattttgggaagaaagatacgttatcgagtagttggggggggcatgaatcatttttcaccccatgcacacatttttaaaagatggggggggtgatgttagtgatgttgttatggccattgatgacgatggcagctgtcatttgttaggcagtgcggtgcctggcgctgtacttgttactttcaacctcttactcattatcgtagtcactttacagatgacagaaccacagttcagagaggttaaaccacttgtcacgctgctagggagtgtcagaaccagtattcacacccagatgctgaagcctgtgctttatccattgttgccttttaaaccgttttaagcctttagaaactatttttgtccaggcacgtgagtctaatgaggaaagtttcaaagaaaagaaaaggggactttgtatttcttctatccaatagaggcttctgtaattagaacatttttccttgacatgcacttttgagtgccaattcatggaatcaacccaactgattggagagaaatagattggcacccctggcctaagcgcctttctaagcacaagtgcacacacgcgtgtcttggtgtgcatagctgtgctcgaacgcatgctcccccaggttgcagatgcttcctgccaggagacgaagaccagctgccgaactgggcaaagctattgaaacacagctcctctctctttagtatataacatgagtgagagatggaggtagggtacagagtaacttaacatctcagtagtttctttcctttgtgttcattaagatacagcccttgactcccagttaaacccaggaggttggagtgccagcatttccgcattccagctataagcagaattctacaaactcagaaaccttctttctctaataaaaccgcatgatgggtatagtctaaacgcttgttttctaaaacaagactaaaacgttatttcatttccttctaaagcaaagggcacataagttttcactgaaaaaggtttcttaccaactgagtcacttatccagtgttaggggagggtggaaactagccctcaagtaatggcatgaatatatgaattaattacttgtgcattcaaactatgaatgagtatatttatttttaataaaagcaagagctaagaaggagcactgtatttcactgatcttatcagatcatctggaagcgaaggggatgtgagcttggggaggaggaggaggaggagtctgaattccttctcacagggaaaagtcgtgaggactgggactctgggtaagcgtgggaagaggaagggcccagcagctggcccctgctctgtgcccacctaccagggtgcacagaaggtgccttttccgccgagactgcgtgatgggaaaacagacaggggagcctatgtgtgtcccgtgggatgggagattcagaagcaacttaagaaatttttgtaaagaactttgaaactgatgaacagtggtgtttttttattttttattttaacttgaaaacaaagttttgatggtatctgcaaacttcagctgtgcaaaagcagtgcctcttcacgccgaagcagtttgcctttaaggagctgccaataaaaaagctaatggcgtgtggcccagcgcacccgaggtgtctgcgctgtgcctctcctgttcctgtttcctgttcccctgtgtcttccactttctttcccagttcctcagatctgttgttgtgctctctggcatcccctgaagcctttctcagccttccaggtggtgttcgggactaaggaagctgctgacttgaccaggtcttacttgctgttgctagtgtagcagtttattagcttgtcccaagaccggtctgtatcaggagtccacagattgtggcccgctctggcccactacctgtttttgtaaataaggttttactggaacatcaccactcccatctgtgtgtgtggctgctttgggggctacagtggcaggattgagcaatcgtgatagagactgtttgccccaaatgcctgaactatttcctatctggcccttgacaaaaagcgtgcctgcccacatctgcacggacagtggcccgtgcgtcgcctgtagggaataacacacgcctcccggacagccaaatgaaaatgcacacagtggctctcacagagatcagacgcgcagtaaatgtggagaagtctgcagaggtctcttgcagatttgtaggtgatagaactttatatgtgtgaatttaagaaagccggttttgaccattagggtaacattgttacataaatgtgctttttcttaaatatttgagagactgtgtagcagagtgtgtcatgcttggactctaagctacactccaggatgcctgggctcagaccttagtcctccagttgtgagccacgtgaccatgggacatttgttgttattcacagccccgtgccttaggctcctcgtcttcagcatgaggattataataatgtgtacctcctaggcttgatctggggattaagtgagttaacacaaagaacttggaactgagcttagcacatagtaaatgttaagtgtttgcttttattgcagttattaatccaatcctacctctgctggaaatccttgagaagctcctccttatggacaggataaatctcaaacttagaagcctggtacacaaggccctgccagacccagcctctcccctctatccccccgtcagccacacacagcgccccagtggctgtcccaagtcagtctgcccttgccattaagccggtgtccccagcctctcagccataagtgccctttcccctcttctgccacagtccccagccaacaatgaaacccccatcaagtggcaccaacaattttgatactttacatccattatatggtttaatcctgagaacacctcttcatgtggacagtgttaggattatctgttttacagagaagagaatgaaacaagaaaagatgcaagcaactcccctaaggtcctacaggcaggcagtgcagaggctcacccagctgcaggctctcccagcccctgaagccagctcctgagggttcagctccagaagtgctcattcagaggactctccaccaacccccaccaaggggaccctcaagccctcagcccccatcagactcactctcccttctctcttgcacttttcacattgcatgctttgttttgcttttatcctttttcttgttttcacccttgctgctttactgcacacacacacacatgcatacccatacgtgcacgtgcatgcacacacacacacatacccatgtagatgtgagcttctcgagtgcaagaactggattgtatttagctttacgtcacctgtgcctagaacagcttctggaatgtagtaagtgtatagttatgttacatggatggagaaaggcttccaaaaaatagtaaggactgattgggaaacactaatccatattccacacacacttgtctttcgcatttatgtaatttcaacattcagttatcaggaggcagcacattttattggtcaaatacatgggtccccgagccagtttgcttgagcttcagtactaatcttctagctcttgatttttctcatttgtaaatggagtcctggggtatctatatttcatgtggttattggaagaaatgaatgaattcattggtgcaaagcacttaaccaagtgcccagcacacactgtggttcagcagctgttatgattgaagtagtatcatgtgtacctttgatttacttgaatctatctacacacaatcaaaaggtgtgaaaggaaagggaaaacaactgccatccctcacccccgcctccggccctgcccgccgtcccccacccccgcctccgaccctgccctccatccctcaccccccgcctccggccctgcccgccagccctcacctccgcctccgaccctgcccgccttccctcacctccgcctccgaccctgacctccgtcccccacccccgcctccggccctgccctccagccctcacccccgcctccgaccctgcccgccttccctcacccccgcctccggccctgccctccggccctcaccccagcctccgaccctgccctccgtcccccacccccgcctccggccctgccctccgtccctcacccccgcctccggccctgttctccgtcccccaccccagcctccggccctgccctccgtcccccacccccgcctccgaccctgccctccgtcccccacccccgcctccggccctgcccgccagccctcacccccttctccgaccctgccctccgtccctcacctccgcctccgaccctgcccgcccgccctcaccctcgcctttgaccctgcccgccagctctcctgctgccgtgtgccgtgcttgtgctgggacagttttccgagatgtggcagccagcacaaaccagctgctcgatctggtactcaagcaaaaaaagaaagaaagaaagaaaaatattattcccaacttagaggaaaactggggctcatgtcaggttcccgcgtgacaccttcctgtggggttttaaaggatgattttgaccatatgtgcatgtcgtcttacacgttgtctttttgagccctttcacatgactgttgaaggtagcagtgatctagtggtgtgatctcaagagtggtgctcaccattttggttaaaatataagaatatgtggtgttgaatggattgaggcagcactcggtgtcccttgcctattcatagggtttgttttttgtttttttgtttgtttctttttatgaccagcctgaatttctcttcatcagtgcagtggtcctctggggctgtctgtatttgagtcactctctgagggcctgggagtgtgcagagagagcatgtttgagactggcagctgcaccagcagcaacaggaagggcctataacggtcatgactaatactccgtgctgatcgcattgttggacaaaaagtatttccagtgaatgttgtcacaagtttaaataaaaggctttactttgtgtttgctttttgtttaggtaactactccagacccccagcgtatagtggggtgcccagtgcaagctacagcggcccagggcccggtatgggtatcagtgccaacaaccagatgcatggacaagggccaagccagccatgtggtgctgtgcccctgggacgaatgccatcagctgggatgcagaacagaccatttcctggaaatatgagcagcatgacccccagttctcctggcatgtctcagcagggagggccaggaatggggccgccaatgccaactgtgaaccgtaaggcacaggaggcagccgcagcagtgatgcaggctgctgcgaactcagcacaaagcaggtacgccacccaggagcacgccccgggcaggtacgctgtgtgtctacccgtgaccacgtgactgcgcacatagctgcattgttccctggggtcacacagagcagtagaatgtcactgtgcttggccgttctttttgtgttaaatatattctgtagcatcgaggtcagagaactaagtgacaaaccatgttttatgatacatgaggaaggaatgtgagcggtgagcacatcagtcgtgggaggtgatttgaaatgcctgtgaatagtcattgcagcagcaaaccagatctggttgcacagggaagtgtctgcgtggtaccaattgaagcagtgacttttaagcaggaaatacgcttaggaacgatttaaaatctaaaacattcaaaaggaacacactccccacctttttttcaccctaccacaagaatcttcctaaaatacaaacttcgtatgtatacatacgtgtattgtgtgtttgtctaaatgtatatgtgtgagatttatatacttgacattcttatgttatattttatttttccaggcatatctatctgtccaaaccaaaatgtggtttaaaaagcaaatataatattttagaaagtttgagttgataaaaggctttagctacaattacttactcatttttaatcccgacttaaaaattaattttgaagtaaatacttgacctggataaaaataacataattaaaaatttataaggcaaaggtgaatatgttttaaaagcacatgtaaatatgttttaaagcaacatactttgaaagatgtgtatcttaatgatatcttcagaagcaaagtagaagattccgatttttgtcaaagggaagcaaaagctaaggtgtgtgtgcgtgtgtgcatgtgtgtgcgtgtgtttttaaatgtgtcttttgttacttttcctctgaagctgctatctggggaatgtgggacccctccagtcttattgttttttccaaataataataaatttcccttgaggaaataaaatgaaaatcaatcattatctttctttctgtctccacattacaattacttaaaatcttctgaactccagcagtctagccctctgccgaacctacacaggctttagggaatatttttgtaaacctgtctgtgaaaactggtttggctgttgaaattgaagttctaattcaagtttaaatgaattgtccattgttgcaactcataaagcgcaagttattttctttttttaagtagaaagtatttgattgcatttggcacgcagcctttggagggacctcagaagatagccacagagagccaggcctgattttgtgtggttacaaagctacgcgtgccccctctctgagtcagtgtttatgtcatcctgtagcaatcaatatataaatacacatccatgcattgccattttccgtttctaatgcgtagaccattccaaagccttgccttcaacttactgcccattttagctcaccaggagtttaaatgggggctgtatatcttcttgtttgcttttaccaaagtcaaagctatactttaaaatggtaaatggagattagaattgagaatattacttttctctgcctgtccccaccctttcgttggaggcattttctgtaccccccacccctcaggcagcggcaggatgcagggtattcaacttgcctccatggtctgtaagccccgcacctatgtgtgggggtgacagatatacagggctcatgcttgtgcatcagaacaaatcccaagaagctgttcttctgttccactttaggccaccatacattaggtcgcctgcttatcccagccagtctggggctggcggacgccccatgttttcttcccagcaccccaactatggcaactctcaggctcccatggtgcaccagcctgaccagtacgggtaggtagcaacacaccccgacttgctgcgggacctgggcgttttctctgaaactgttaacgatcgtgccgtctggccgcgaaaggaacacccaaaccaagaaagcgaaacacctaacagaaaatccatctccaagggggttgtccttctgtccatttttgttggtgtgtttgtttcgttttcctttcgtattaacagtactgtggccgttcggtggaaacccgcatgcgtcctcaggccctgtctgtgcatggctttcggcatggctgctttccttcatgcctgagagggaaatagaaactttgatctgtgtcgaagacatgatgtcaccacctctggcgtcatttcccccattgttgtcattgttttgtctaggaacctgtgttgtgcagcgctgttctcatgactatattatcactcctgctgctacagtgagcggctgccatacccacccccaaattaagagcacagcatctcatttgacaagagactcactgcagttgagctgacaggctattcataggacttaggaggagtttcattatatcaccaccaagcaaatgtctgtgccaaaaacttctattattttttctccagcgagtatcagaatattgaagtcaccaggaaaatacaacaaaataatccaacagataattttctgtctaaacacagtgttgccatattattctcaatttcaacacaggaattacatacagcaacaaaaagtatctcttctttcctactacaaaactgtgtaatatcaggttctgtcaccatgtttaggttagtaaatgctcttaaagtctattactattgagtgaattgctaaaaaaaataattattgctatcatcctgggcagacttaatcatgtttggtagttagttttagtagagacatgccccatctttggttaaaatcaaacagggaactatcacctagctttgtttaaacagtaaacttatagaactatgctttcactactggttatgaatgcctgacagagctttttagtagttttatattcagtttacatttatttagacagaacaaatgataattttggaatcgagagttctaaagtctgtaaacatggccctaaatgtggaccaacaaatatagaatcctgtaaacatcatccccaaagtgaaataacaaatatagaatgaggtaaacatggttattcttgggaaattggcttttcctctttcttactttcttgtggtaccttcaaggtcaattcatgagtcagtaggaagataacagtcggaggaagcaagcattcatcatctgcagctaatccataggatctgtccttttaccaactccagaggcctctttagacccacaaagctagtttgactgtgccttgccaaaccacattaagcagctgtgtaaaatgaatttaaatggcatgcatcagagtgaaatctcttccactggggcagaaaatcgatgttagctaaccagcacgaggagatcaaatctgtatttcagccagcagcatccagatagcttccttagagtacaacacctcctccttaattaaaaataagaaaaagaaaaatgttggcgttattctatgtaaatcttataaagcacacttggcaagggctcatattcatagccccatgactgttagctgtgaattttaacttttatgtctacactattctttctaaaaaaagaaagaagttaagttttatttctattttaaatcttccttctgttcacttcgcaatgcacataacctgtgttgtgccttttttaaaagcagaagcttgaatctgagaaaacatgtgtatgacatgttttagtgctctgggttgagaaatctgattttcaacatgcttttgctttacttatttaacagcttgttgcagcaaactcgtggttttgctttgatttttgttcccccattgatggctctgttaggttgaagttaggttggcgattagaaaagctagtttgctaaatgttagtttctctttgggagaggaagaaatggcatagtgtgggattcacagagcttgtcagaatgacttctttctcaaggcacaatcccaaaggacctagagcccatggaagaatctgaaaaggacaaattaatgatgaaggtggagcgtgagtgagtgtgtgtctgcaattagataaaaacagaatgctcattgtaaaaatgaaggattggggcaattatgcttcagattttctcagctggtcaagtataagatagtagagagaaaaaacatgcaagtttaactggttagaaactgttttattaatttctttgagagtgacaatatgaaggtaaaatcgacctgctgcattgaataaattaagaaacatagattaattttttttctttttcaccttttgagtaaattcctcattttgatcatcagaggatttacaatagaatctggtgaatcttcttgttcacgtactagattcactgtgcagtaatatccagtcatttgaagttaatggtttataagtaatatctgtacagaaccctcctccttctacacactgataccctttttatctgaaaatgcattgttgtgtacagttttaaagcattgctagttaaggaatttacttttgaagatataagaaacagagagttggaaatactagctgatcttactaaaagcctacttcaggaatggcaaattagttccatccatctgtagatcagttctcgtggctctctgtagcatcattttggaggattctgagccattacctgagcataggtgagccaaagtttgccagaagcttaggaagaactttggcctaccacttcctaaagagcatagctgtggatcccaggctaaacacaggctttaatatagctcactacaacctcaaattcctgggctcaagcaattctcccacctcagcctcccaagtagttggtactacaggcacgtgccaccatacctggctgattttatctttacttttttgtagagacagagtctcactatgttgcccaggctggtcatgaactcctagcctcaagcaatcctctcttctcagcctcccaaagtgctgggattacaggcgtgagccaccactcctgaccttgtaacattttttaaatgactgaatccattatgtttaaaggctgtgcgtgcagatgtgcacaggtagaataactttcccccattcattccatgtgtcttacgtccttttattagtcctagatggtacctggtgatgtccagcaattgacagctcttcaaaatacaactgattgtggatttggaaatttcagcattatccagaattttttcttggaaatgagctctaggaggaagcatgatttcactgaatttacagaagatctcacaagccctggatctttaagccagggtagatggacaaacagattttaattccttaaggcctgctaccctagcacctcacatatataaattttgatcaagtcttgagtgacttgagattgtgtcaaaattctggcagggatctttaagctaatactgtgttcataagaagaggttccataaggacacagagtttcaattatagaatgagcagatctcagaactgggaaggttttagacgttacccagcctctatttcttgattttatggtggagtcaacaaagacctacagggtcacccactcagaatcattgagtcaggagcagggtccttgtcatctggtcctgttgttgttctgctcttctgtttttttttttgttttttttttttttttttgagttggagtctcactctgtcgccaggctggagtgcagttgcacaatatcggctcactgcaacctccgcctcctggttcaagtgattctcctgcctcagcctcccgagtagctgggactacaggcacctgccaccatgcctggctaatttttgtatttttttttagtagagacgggctttcaccaatttggccaggatggccttgatctcttaacgtcgtgatccacccgcctcggcctcccaaagtgctgggattacaggcatgagctactgcgcccggcctgttgctcttctttctacttttttgttttgttttgttttgttttgttacacaacacctcttcatttttgttctccatcatatctagtggcaatcctgctcctagaaaccaaatagtaacgagtatcttcgtggatcttccacctcttgcattgaaatctggattttttttctcttatctgaatttcgttacctctgctgcacctaaaaggaaatacatgctttgcacattcccatgtagactccacgtgcagctcagagttagattgtttccagagccaagcgctttgtgagataagtaacagttacttactggcacaagggcgggtttgagtttctgtccttttcaccatttgaggcttttaccaacactgctttggcatttaacattgttgggactggagtatggctgttaaagtacgaattgtgaattgtgaattgtgggggagcagagtgggaaggtagtgatattgacacggataaaggtgcacacctacatgatgctggtataagcactactgttcctttgctgtccctgagagagcccttcgtggactaactgagcatcagaagaaggagaagtctcagacttcttaatttcaaaaaaaaaaaaagggtaaaatgaattaatttgaaaagtcttgttactcttgactagaagggaagttttaatactgaatatcacaaatataattctgtagacctgcattttaatactacatcataccaaaaactagggtcactgaaattagctttcaaatgttttgtgttgagtccattaggaaattgggaactttagttaagattattaaatcttagccactcattaacagggtgaataaattccatagggtagctagatcagtggtaaccccaccgtattgctgttggaggagctgaatattttgggagagaatgtgactagctgccttcctctgcttggaagaagctgggtctatttacaaatgcaaatgaattggactggcttgttgggtatacagtggcttgtactgtggctcatgtgcaccccacatagacacatcttccagccactgttctttattgaggtgtatctataattcatatcctgtgttgccatttgccagcaaggcactttttctgtgttattttcctctgaagccagtatgatgcaattctgctgatggacgaagagctgctgatgtggaaatacgttaatggagatagtgcattaaaatgtcaaagagaaggggcaaaaaacttcgaaatgtgtcaagccccagttgtagtggggtccatgtgctaaagagcaggaagtgatttgtattaaccaagaatccagccctttggattttggacaattaggttttaacataatagctatgatttgaaaagtcatgttattgaaagacaaagagaaaagatttcaaagccttaaacagattttttatttctgcaattaaatgtaagcctttgcattatcatctaaatactacgctttaatttttagccccttttttctcttcaaaatttagaatttgaatgaatgttattatgttagtatttaaagattatgatttcaattaaaacttttagaattacagaactattatggaagccataaagtgcatttataaatcatcaaatcaaaaagtagtaaaacactaattctaaaaggatcagagatttattttttaatgttaatgagagccaaggaatcacagcatgaactgtgcagcagacctgggagggaccggagaccatgaggtgccccaagccactcgtgagcgtcacccagagattttcgacagccgctgtacaccctcacccagccagggggccaaggcgcgggagcctcaactccaaaatcccctggtggttctggtgtggaagccagctcaggtctgaggggggcctcagagataaccgccactgcagagcacggaggcagcatggagtgggaggtttgggaggcatgctccggacgcttcctccttatgcagtcttcctgagggacatcacgtgaggagcacacagggctcgcactgggagcactctggcatcagaagctcgagtctgcgccgacctgaccctgactcaggctctggagatctgttgatcatggcagagtgtgtcttcctaaatgctttgtcttgatttctgcccttttgcttcctctcagacctcagtatcctcctcatcccctgaaatactcagttccccaccacacctagcctgccctcttcattcggatattcccctctccgggtctgggtctggccctctcacagctggtggctgtgctcactcggagatggctcaccgtgactcgcgcaccactgtctatgccacctgtcttcacttccagcttcatggctctgttaacatcccgcccccatagatacacacttacaccagatgtcctgggatcgtcacagcgagaaccagcattaaagcgcacccatcactaggcgtcattagcagcccagcccagcaacccccacggttctgagttacgaaaggcagggatctttggaattacgtgtgtgcaacaggagtggcaatggccagtgatgccaacctgccaggtgtcaggctgatgaccagcaggtggtgaatttttcaccgccctgaaatctgataacctcaacagtgttttgggctgaaggcagcaggaagtttgtaagtggtgaagaggctatgactatgtcttagtatattgcagcttggggtttggaaagtgtcgtgggtcacagggcatcttagtagcagtaaggagtatgagaagcaactcactaagatgctaagattcctcttaatcttggtcttcattcttattttgaactccatttctgccattatatagatttaaaaaaccaaacaggccgggcacagtggctcacgcccgtaatcccagtactttgggctgccaaggtaggagaattgcttgaggccaggagttcacaagcagcctgggcaacgtagtgagccagtctttacagaaagtgaaaaacagtgagctaggcatggtagcgcacacctctagttccaggtactcaggaggctgaggtgggaggatcacttgagcccagaagttcaaggttgtggtgagcgaggatcgtgccagtgcactctggcctggagtaaaacagtaagaccctgtctcttaaaaaataataataataacaaaaaatgcacagacagaaacctgtaagattgtggcccttgttttaaaagtgaactcatactggattacttttgattgttaaaattcctgccaggtaagaacctgtctgaatcctgtcctgcacagagtggctggtgaggacataaagaactatagctttgctcagcttgcaagccttgcctaaattttaaccctaactgaacaatgtttggctttaccaaactaagtcactttgtggcccaggccaccgttaactcaggaaatctccaagaatttttaggaggattttttaaagatcagaaattactgtttttctgtttcctggacaagtgcattttttattagaggtttctacacaatattgctgcaacacagtgatataggatggagaactcaggacccagattaattttcttaagcccactgacaagcccattaaggcatgagagttagatagaacgcatgtaagatagatgtgtgcttccccctcgcactgctaaaactcaggttcgtccatcagggattgttacctactctgagtattgctgggctgataagctctctgtgtctgaggctgtgtggctccagacctctaagagacctgctccctccactctgcttctgtggctcctcggcagctaagccactttgggattagcagttcactcccctttataccttgtgaccttggaagggatgtcctggaataaaggatgtggctattcctagcactgagaagtaatagccctccttggaaataacagagatcttttcttaatggtactatgatctcaagataaactttttaagtaaagatccttaagtagaatgcaatagaggtgacactttctctctgtgggtgacatccatggcagctaatgtttctttcatgctgtatggatctagcttcaccagaccaggaaactgtgccatttacatcttctcagaggtcagtgggatgcgacatgataccaaacccccaaagttctggagagtcatccattgcagggaaaagacaggatttaggacccactgctacccccctgtggctctaatccacactgtgcgcttgaggcagcccatgtgctggggatcagcagggaaaagctgaaatcagaatctctgaactaaataccttcacagtattgaggttcatttttgtatggttgccaggaaagagtccgtagtagcagaacaatgggcttaacaaaccaaaatcaactttgaggatgaagagaacttccttagttatcagttgctaaaattcaagcaaccagacaacaccatgtttgcattttcttcacaccccgacaaggaggcctctcgcctcagaacccctgagctctatttgttctcctggttgctttgagagaaaaggtgaagatcagtgagctgctttaggaacaactaaagctggttacctgcattgaagcaaaaaggaagagctgaatcttgaaattgcacaacaggtgccatttcagcagggagtgccaggagcagagctggtaacaggtcggaaccttctgagaagtctgtgtgaagtatgaacaaaagggaaaaacgtttctgatgttagaggcttttaagaaatccagactggaatatgcagtattcctcagtgcttagcaagaagagcttcaccaagatgcaggagtgaaaaatacagctctttggagaaatgtggagacaatcaggagaaatgctttgaaaacaagaggccctgtgggcagtgccacattttaaaggaccaggcaaagacgtgccagggagaagttctattctgaagagctaaggcatagccactgaaaatattattcttgagagtatggtgacaaagttactactgttcctttacttagaagttctctttcataaagctgtcgcaaaacaatattcttctttgcccattcttaaaggaagaaaataaaatgtaaacatatcagctaccaaaggttttggggagttattaacagggagctggaagataactggtagctgctccagcttgtctgctagcactgaatacatggaagctttctttgagtgagcaggctgcctcgaaaacaggtcacattcgccagtggaggaagacttagacaagactcacaaagtcttatatagagggttcctgcatagggaggaaagatgaccccaaacctctgcttcctgacctgagagtccacctgcctgtgtgacgctaggtgctcagaggcctgtccaaagccaaaccctgtccacatgtccaaaactaagcccacgctttcccctgatgttctttatttcagtgactgctccattatctgcccatcccacaagctggacacctaggagacagctaggcacaacttttcttttccccagaggacctaattcatcaccaaatcctgtccgtttcacctccacgatattgctcaactctctcttgtgctccaccacctgttccagggcaccatcatttcttccttggttgtggtaacagcctcgtaacggtcagccccacattcgttcttcttgcctccgatgtgttcttcccagcatggccagagaacaatgtctttaaaataaacatattttaatgccattgctcctgcttaaaaaccccaagtgtcttcctgtttctcttaggataaagaccaaacccagagaaccataagcctggccccgcaccactctcgcttcttattttgctctaccgcattttctcctggagagggcctcctggatgccccagggcccttgaatttgctgtttctcttttctcttctccttacctggttaattccagtggattgatccctcagatctgagagatggaggggacgtcatcccttccttgggaccttttcctgtgctcgccttcctgtgagctcacataacacacagacctctccaagccacgcatgtggtcgcaacttcgcactcgctgccctggttgtttgactttggttgtgtttgtttttagtcttggcccgctgttgtgctcattcctctcccatacttatcttaaaatactcatcttggacaagtgattataactgtcaacaaagcagtaggtatttctggttaattgtaattacttatagcatgtctccctgagcaaaaggggtagaatctattttttttagtagcatatggttatatacttttacacgaatctacatttttaaataaaggcacttctattctatgtcttttgtctaatgagacaaatgccactttaccgccacaggattgattcctagccagagccactggcttgttgaaattacattattttgccaccagaattgctaatgcagctgttgttgcaggcacgctggtggattagccacaccaaaaattgaccagggcttgacggtcttattttctgttttgattgtgtgtgtgtatatatatatatatatatatattttggcgggggggcacatagtagttttccctcttaaaatattaaatttaaaataacctcgactgagtctctccttctcagtactgctttggaagagtcaccatgtaattcgggttgaaaatctgtttcaccagtgatgctagatacatgtgtgagaagagtttgtgtttataaaacattttttatagggcatcctgtgtaatgttaatgtatgcaattggatctctccagaggaataaagtaacacatttagaaataaactgctggaattggagcatttcaaggttttgagtactggttctgatgactcttgggtttaagtgataaagtgccccaagttttagtgttagcctagtttatgttgttagtaagcagtcttttctggcttcataacccagctacatctacagtgacagtccgtatagagaaagttatgtacacctggcactcgcactcattttcccaataaagtgtgcactgcgtgatgctcattccgaacataactcaagggtggtatttgcagtggatgtgctggagcttcccccgtgtctgccactgggatgggactttaaagtggcttcactcacagggtctccatttcttctgtctgtccctacccttctccaaagaactgtatcagaaacccattcattttaaagataaccacacacttcaccgtctgtcactgttgagaaaatacagtgttgattgctaagatgataaggcctaaatattcttctctaaagcatcaaaattattttaaattttaatgtagttgactttaaaaccagatatttagaaagatgtgggtactgcatgaaatttcatactaatatttttaactgctgaaagcaaactgtagtgggaagtgatattcctctttctgttttcacactgaaccattggaaatagtcgcttgaaaactggtgtttgctttgggcttttttccccaaagacagccctttgttgggatatgaatatgtaatgtttgagaaatctccaaagtgaataaaaggaaaaagtaaaaaagttgttggggtatgtatgtgtgcagcccgtgggcaggaatgaggagtgctgtagggaaaactcacaggtcctgctttctcaattattctccctgtaataacctggctttgcttatagaatgacagttcttaaatacctctggtcccaaccagatttaaataaagttcttctggttattccgcaggtcagcatgtttaagtaataactccccaatttgaacattgccatttaagaggaggagggagcggtgctgtggtctaaccctggcccaggcgagcgcagtgtcggcatcctggggtctggggtcaacaccacccaaccagggtcacccccacagtgtgcatctaccgaattattgtaaatgtttgtctccttacccccctgagatgttcctaggcagtcatttctacagccatggactcggcatctgcagagtcaggacagctgtcctttgtaacagacatgaagcccgcaggccccctggaagccagagcccaagggtctggggggaggctttgcttttccgggtacagcttaggtttctgtagggtttcacattggaaacattctgctcgtttcaattcatgtttttgcctgtttttgttttgttgcttttcaaaaaagcaactgatttacttcttaacactcctaattcatttggagccgtccaaatgttgtgttggtcagaaggggctcagcagccagggagcgctgctctggaaaggacccagctgctgctgaggtcgcctcgaaacccaggtcgctgtggtctcgggcattgtattttcagccccaccaaacaaggagctttttgttgtgagccacagactcctcctaggttagcaacaccacgctgagcaggagtgctgggttagttagggcggcagccatcttaggagtccatccacagcccgctgtctccactaaccaaaatcagtggcgtgcagtgcgagccttcttttggtatcaggcccatgttgcttgttcaaaattaccaagactcttggcagtagtgtctcaagcaagagcaaataggatttcctctgcaatggtgaaagactggctctccccacccagacaggcacccactgctctgccctggccacgtgtggcctgtgctcctgggaggactcacttcctgccctggaggcccagtaggcctgcagcaggtgtccagggagctgttgtattcatgtctcccactacccctcactgtggccagctccctgaagcctgtattccaggactcccggagagtttacaccctctggtttgtcatctttgtacaaccgcagggccatacaccagacagatggaaaggcatggtgcagcaggctgccaggagccaggcacttggtctcactgagtgttagcagtgttagagtcccatagagaaagaagtgtagtataccgcactgatagtaggtttggggaattctatttctgctacttactagctgtgtgactttaggcaagttacttaacctttctgatctttattgcctttattaatatatgagcataattccacctaccttcctccaggaatctaaaacattaaatgtgtatgcctagaatgtgcaccaggcatgcagtaaatactaaataaattactgtcactatcattaccagcccctccctgttctggtgtaaaaaactgaaatccaaaggaccagagctcccagagctccagtgacagagtcaagacccctggctttttaaccaaacttttaaaactacagatgtgctttaattaaggaccattgtaaccagcaactgacatccaaggcatggacctcattgttagtttaaaggtatttcttaaaacctgtagtgtgtgccttcatcatcttctggtgattaaagatggacacggatggacagtgctgtcctgggggagaaatcctagatgagggttggatgattacttcattcagtcatttgcctggtggattttctattctgattctcttttttaccttagtataaacaagtgtctcaaggaaccattagtttcatacatgttagttacactatatatgagacggaatttaatggaagcttgaaaaggcgaccatctttgtaatgccttttttcaagaataaaaatgttctgtagtaattcatccctttaacaattttttttcttttttttagtaattctcatgtgcaagggattaattaggcccagatcctcctctcaggaggcttccatacctagaagaaccaagacatgcgtaaattattttaacatacaaaagaaagaggtcagtgctacaaaaggcatagatgaagctaagtggagaggcagggcttactttcaggaaggatgacaaggacagccatcacagagcagtggccactaaaatgcatcttggagaatgggccaaaattggctgtgacttggaggcagtcactgacatggaagtagccttccagaaaacataaccgtccacaagtgaagatgctcttcagtgattgtctgctaagacactgagagcagtcccatcaggcgccacttttgaagcagttacctaaatgctcaattgtcccttgtttgaagaacacctcagaagggatacttctaaggtacttgagttaatgccaacactctgcaagatgatgtaaagccctgaaccatatagggatgtgtttatagctactgtgcaattgtgtgcatgagtatgtgatgacctagaggttaatcagaagctgttggatgatctcagatctgttcttaatgaactccaaggggtattctaattctgatttagcagtctgcagttattcaaagtggactgtcaggaagctaagaattgcaggctaaagtaatgcccatttctccctgagccaccctcatacctaagaatctttcagcttctaacagtgttctttccaagccatcatggtacattagattgtacagaatttctctagtttgtctaatatttaaagtagaccagttatggctttgatagcttgattttgcagatggtccacgtttgaactttttgtacagaggtttttcagttgagtccgctgaaaataggtaaacaaaaggaacagtatatttaaaaaaaaaaatgatttatggaccagacatggtggctcacacctgtaatcccagcactttgggtgggcatatcgctttgagcttaggagttcgagactggcctgggcaacatggcaaaaccccgtctctacaaaaatacaaaaattagctggatgctgttggctcacacctgtagttccagctatttgggagagtgaggcgggagagtcgcttgagcctgggaaagcagaggttgcagtgagccaagactgcgccactgcacttcagcctgggcgacagaatgagaccctgtctcaaaaaaacataaaaataaaaaaataagatttatgttaatcttttaaaggatctcattttaaaatgccaactattataccaagtgatagcttaatggtggtggagggggttgtaattaatttggaacagataggcagggtgtctttggatttgtacccctctactagcttgtactcctaagatgaaacatgagtagccaaaactttgaaaaattttttaaaggtatgctctttacgtaagaagagcttgactacaatggtggactcttttgacgcttttgccaccttgctatcatttctgtttttagggcaatctctacaccactgtgcagttaaaatctctcccccatctcgttactaacagtcagagaattgacattgtgtgacagttatctgcttcaaatcagagaatactcttgacctctttgcaagagtgaagagaagtctgacagggcgtaagacaaaactaacaagactaagtcaccaagaccgccttgtaggtctgcaccaccctggggacgggcgactgcatgctagggacacgtgcagctgatctaagtgcccatcctcctctgtaacgtaaaaagcccaaccaacaagaagtggaagtctgatgtctactgtggcattttaatgtagggaaattggtatgtttttaatagaacctaattaccaaagttaaagagtagggtcggggagagttttggaagtgctttctcccatattcattatatcagaaaatttaggtcaaagaagtttttttaaaaaacattcccacactgcccatttgtttttcatttcttaacctttgggtttttatgtgaggttactaagtagtgttaatagtcagaagttaattttgcttgcttttgtaattcctgttcttatttcaagttccccctttcttgcttatattcctctatataaataataacctggaacacttgacatgattaaaaatgtgtaatttacttgcagaacttgtaatatttggaattgtaaaggggtgtattaaagagttacctagcaatagaattcagcctttctctccaggaaataatctgttttacacaaacatgaaaagttatagccccaccccttacataaatgcattagtagaaatgactgccagggcaaaccactgctaatgtgcatggtcggtatatgtgtgctgtgctttctcttcctgtaggcaaggcagtttccccggcatgaaccagagtggacttatggcttccagctctccctacagccagcccatgaacaacagctctagcctgatgaacacgcaggcgccgccctacagcatggcgcccgccatggtgaacagctcggcaggtaaccttggcagctctgcgctcctgagcccctctctctcccctctcctcctcttaggctccaccagtgaatctgcctaaacggcccgagaaggtggatcagttggcgaaagtgggaatcatactacttttctgcttctcagaaacttgctccatctatttaagacttgagaattacattatattttatgtaaattatttttattcaatctgtgtttgtataacaagtggacatatttcaagtattattggagattgttaaatatgcacactaagttctctttctctttgggaattattagtattggaagatcctcaaattctctccatttggtagtggtggagacaaacatttcgaattcacatttcaggggaaatcgctggaagggcagagcaaggggggtttgaagtactttttacatttagggaaacacctctaaatgtatgctcggaagtagctgcttcataaatgctctgtgcagattgtctctattgggaaactgttttaaatgtttcatgatgtttagttattttaacccattttataatctccacagtagcgttcttaaaagtcatgcctgatgattgcagtggatgagtagccaatgtgtggaaaatatcaagagtgtctgagactgtgcatatctcccatgatcttagactcttcaagacccttgaaccccctcctcaggttccgtaactacctaaagacaatgagtaccactttttacataaagtgatgtgtatttccagcgacctgttactctctgtcacatgttaaaatggatctcacgggaggattccctccttcagagactgcagggcgtggcttagccagtgtgtatcccgtgatgccccgtgatgcgttaggaatgcatgggacagccagatccttggttctttctgattacattttttcatttcttctgccttccacctcctttctggcctctctgtctttgaaagttcatgtccctgtgtccggcggaacagccagtgagaggctgggctcgcctcctgtctgagcttctgcgtcgttgatttctaggacctaattgaagggtgacattccatgataatttctcttgaaagatttatgaaagaggaacacatagaaactagtggtaaaaatgaaggtttttaaataaataaaatagcccttcctgatgctgcgttgagtgcttctccatcacagtttggtggatgttttacattcgagatgaaagtgaaaagcttgcaaacagcctgttagctggaagcctcttctttccctaatttccctaaccagtgctggcccaggtaacagaatattgggttgtgacatactatgttttgtctgacttgctggaataaaattacttgagagcattgaaaccacacaatcagttttcacctaatatcagcagcgctcattttccccgtcttcctttggaccccagagccacagaaacaaccaacaacaagcagatggcccagtgccctgcctcagaagatttatgtattcctaaggaatagccagcttaatggagattcacagagagggtttctttctattcttattattcagataattcagctattcgttattccgtacagaggaaatctgttcagtgaaaggccgtccatcctcacgatcttttgtatggggtggtagtgtatttttttactgcattgtacattttgaaacattgaatttttaataatttaaacatttatccagttttcctctacacgttgatctgattttatcccaccttgattaagtgaaatgcataacagaggaggactggccatttcacattggctgtgcacctagcagcaggtacacgtgaatctgctgttactgcgttctgatctctcagagagacaggagtgacgcagagcgttacagcacagcccctgtgagcgttgggatgcgtctacctgactgcacaagagaagggccagaaatggtgggatcaccatcactccagtctccttggtttgggcccatggagataaattaccagtgataacagcaaagcatttctccatcaaaatatacttttggagaaagcgaggacagcacaaatgatggccaggtctggtggtggaattttctgaacctcagcagccagtgcaaccagcattccagcaattctcttcaccgagttcaaacaactgtgttgtagacagtgtacggggccaaaaaaaaatcctcctgtgtagtgacaaattgttacaggcttcagtgagcaagtaattatttaaatggagtcagtgtgagtataaatgtgacaactatttcttcacttaaaatgccaagggaaggaggatggtaagcagtgggaatttttccttctaaagagcttttttggttttgttttgtttcaattatttagattaaaaggttagaattatgtattactgtggacaaaattacaaatcactgtaatacaatacatgtgtgattggttaggttttacttatttgtgttgaattttataatattcattagtcatttgcacttgtctgcatataaaccgtcatcttaaagtggacatctaaattccaaaaactttatctcccatctgtggttctaagtttgcctcaccagacgctactctacaaaatgtagggcatttctcctactgccacctataaatagcacaggagcggccatatgtgctgctggaaccaggctttctcacagagagccctgggcacattccagaagtgagtccttctgctaacctagcaccactcagtcccaaacatgaagtgtcccgttaatgccctgccagtacagggtatcccagctccagcaggcctttacgaagaaaaaggcaatcacactaccacaaaaactgagaacctcctacctctggacttcctgcagtgcttgttaaaactaccgattctggggctcccttcagaattcttgaggtgggtccaggaatccgcatccctgaccacttccgcaggtagttttcatgcatgcaagctcaagtttgagaagcgccaatgtggaggtattttgctcaacagtctcctggcagatctgctgccagctttgtggggcattagctgtttaccagatgatttgctgttttgaaattgaaaaaaagaaaagattcacaaaactactcctagaatatcaatcttccagctggatcactgttttctgtcttgggacttcagggtctctcacaaaggaaggtttgggtcttcagcctcattgcgaggggctggttgtccgggttgtttgtagaggttgctggggtgctcactttcatgcttgctctaaggtaatgatttcaagtgaattgctgccctcccaccatatacaaaggacttgataaaagggttttgataagttatgaaaaccaaatctcttaaactgggggaaaatagatcctgagattatgccaaagtatgtggatggctccagactctgtaggtggctgggggagctggtttccttggaaagccacccagcatggccagtgtcctgggggtggccacagtggggagggggcgctgatggcaatgatggggtatgcagggcctccagggtactcgctggccccactctgtgccatggagggtcctcccggtcagggctgtcagggccttgcgtatccaatgagagcagtgcgtctcccgagccgttcttagatcctgtgtgtgttaccttcacagtggactttctgtcttggcacatgtaaacatagtcatgaacatccgcggatgtacatagatcagccctctgtgttttcaaaaacaagaaatcaaatattttgcagtctggtatattaccatgaaatgaaaagaactgtgcatttctgacctatttcaccatcttctggaaatgattttgcagacttgtaaggagactgagtaaaggaagaggaagaaagcaggcatgagtgttgaagttcggtttgactcatgtcatgtgttctttacgttccttttgaatatattaaatccagtgtggaatagctgccttaggaccttgacccacacttactttaagaaatcgttctagttcttaaatttcaatggtaaagccagaggctggtgcttgaaaagtatttacagtgctcaggcagcactttctgcagttacagattctttactgcccctttttatgtctgaactttacatactggattactcgtgtcaataggagaaggaacagtgccttgatttaacacgtccttgtaatagtcgtggtccttctcttctgggaaaggagaagaaatagtgcccctggagtcccattgccttgggaggcatatggctcgtttcagtgattccttgagaattctggtaagaagtcaaaaataagcatttaaataaaaagaatagtaaaaaccacagtaaggaaagagcttctgatccatttagtaaaataaaacatacattttataaggtagaaatattaaatagaaccatttattactctaaattctatccttatttatctctcaaaataatagaacagtgccacttttgataatttttctatttgcacacccaaaatgcctgttttaaaatatataatagagaatgaagaaatttggggaatttcagaccaacaatgtgtttatattcatgtaagtctgattttcaaatcagtgtaaattgtcagtaatttccataatacatattggcctagttctgtatgcttacaagttgcgtttgtgtacgctagcacatttaatgcgtaaaatagaatcttactattcctgccttcaaaataatattcatacataatttattgtaaatactgacaaaactaccacttaaaaccattggagaagctcgatgccacagaagccatgtgcccatgactttaccactttctctggaattgttttggctgtcattcctttgaacccgctctgaatcaactagccaggacatgtggactcgcatacataagcccctcttttcgcactcatcctgctcttttatccttctattcttctgaaaagggtgttttttaatgtacaggtttactaattcatatctcgttagaccccagagacaaaactgcgtggaagcagtccagtccactgctttgaacaaggcggtcttcgcggtgtaatatctctcagctgcttgaggtttcacacattcacaaaaataacagcatttttagctgatcccaatagatttttctctgcagctgcatcacttgaaaaagctttttgttccagttcttaaagtctaagtattgaaagtaatttgaaaaaaagaaaaacatcccaattatgatttgtgtgtgttgtgatgacttcaaggactgactgggctgcaaatgggctttgaaaaacaagccaatgcgcccgtggaaaagacgggatttcaaagtgtattgttgagtgtgctgatgtaaactcatgggcacgtggcagggcaggcttttttggcaggacctgtggtctcaacctgcagtgatgctaacgatattagcaaattagcaccacaaagcttgccagctaattcaccagagcctgctcactctctcactgctgtaattaaaactaattattttctaaaacatagtaatacatgaatatgtgcaataatcattttgtagtgggcaatctgcggagccttttttaaagctttttttttttttcttggcacataacgctacatgtgtcccgccttggttgagccagcactttcatttgcagaatgtagaatgggccctgttcatcaaacctcaggtttattttcatttgaaataggcctggtttctggttcttcccactcatgtataaggctcatcattctctcccgtctctctccttccctctcttcctcactctgactcttcacatctggttggtgcctcactcgcagcccctgcagcccagtgttgcgcagatggttttcacagtggggttctgtagaaattcagctgttattccctggatagctacactgattccttactctagtcttgttcttccactaaaaagaaatctaaacccatatttttaacctgaaaatgtctgctgtatctgcaatgaatgtggagaaatcagttgttctatggtgaacctttgatgctaaagcctaaatagaattgattggatttctgagcctagtgctagaaaatgtggtgttgactctggagctgctgtgggcctctgacctgggcattgagctgctgtaagggttgatgaccacaggctctcagacagactgaaaggatcccagcacaactgcaaagtaatcagaaatcctttccttccaaaatttatttttaattatattgtttttgaagccatctgctgtgattgtcttcccttattgttgactagactacgtgcaatagataaggttttcaaaagaaacactgtgaaatgtcaaataattttgcaaactatagattatttgcacttatgaaattgagaaggcactaaatcctctaggacctaggtagaaaatacgcacacccagtatttgcctccaactcctgattagtaatttaaacatttgccttatttccacttgttgcctactcttttgaaggtataataattttgaaaaaataatattgatataagttgaccttcataggtttgggtcttaagcacacagaatgactgcccttttttttagataaaaaaggattttgccagaatgcggtgctgtttgcatttcagaaattaatatgctccccattacaatttcttttttcttttcttccttcaagggaaatgcaagggcctcctgcttcactctgtaacttgtgttggcaggagtacagtctgacgaatcacacatataatcctaaactctttctcctgttttcgattagcatctgtgggtcttgcagatatgatgtctcctggtgaatccaaactgcccctgcctctcaaagcagacggcaaagaagaaggcactccacagcccgagagcaagtcaaaggtacttccttcgcctctgcacgcggtgtgaggtctgcctagcaaaaagctgccatgtcgttctctcttcactggtgttggccgacacttttttttcatttggtctcctctgcatgccttcattttgtgcaacatgtttgtagtcttcttttctttccccagccccttcatggtgtggatctgaaagttactagttcttatggcattaactcacggttgggggagaggggtggagggacaagacccacctaagaaaaatgcttcggggtggggagaagtaggggtcctgcctggtttcggtacttgcagccattttctctgccttcagtttatagcttcctgttttggccgcctcagcaacaacaacatacttaatattttgctttcctgccttatttgataaataaggtgaacagctttttttttttctttctttcataaggggtaacccatgcttagcattccatgtaagcttgaagtaagcatggtggcgtactggccttctccagcatccagcagacttacccaattatactaattaagaatgttgttttaatacctttatctatgtgtggttttgtgtgtttgtttgtacatgtctttatatatatatatatatatataatatatataaaaaaattagtttgttaaagtggatgtactttttgttattttaaataaagtttgccctacctttgtcattttttttttttttattcctctaccacaggatagctacagctctcagggtatttctcagcccccaaccccaggcaacctgccagtcccttccccaatgtcccccagctctgctagcatctcctcatttcatggagatgaaagtgatagcattagcagcccaggctggccaaagactccatcaagccctgtaagtggctctggtttttttttgttttttttgttttttgtttttttggggttttttgataattaattaattctacttgaatgcttgcttgtttatttgttttgtaagactttttcttcattatttatccatgaaagggttttctttataaataataatattagtgacaaaatgaataaagtttgcgtgcatcaaagaagttgatttctggtaatgaaaaagctgttataaagaagcacctctatacaaagcatgcgagtgtgttaactgggtccaaactccttcacacagtgactttttaaaaatgtctgatccattatgcacttatagaagattcttcaaatgcgttacttctccatttatatgggaactaatagcagccattgactgaatgataagtttggcccctgacctgtattttgcatgttctatctatttcaaaactgcctacctgaaagaagtaaatactcaatttgggtatggtttagtgtaacatcagccctgctttatttttaacccatttgtctgaaattaataaaaacgtacaagttgttagtatgtgaatgaatttttagtttaataatgtgtacctatgttagaatcagttgagatagaacaattgtattctgcacaagactgctgataatcttgaaattaagtgttgatttttgtatgatatataaattataacaaaaatgtcacggatgtatcagggaattttgtaagcctcaatgttcttctgaccctagaagtgggcctttagtttcctactaaagaaattctgtaccattagagagaaaaaaaaaatggtgctgaagcaacctttattttacattcatataaagaatcaaaagatcttaaaaaaaaaaaaacaacatgcaattacttgccaagaaggcttaattaacatgctcatttctgtaaggcgatgtattgacgagcacggctcaggaaggcaagttggaggcaagaagaccctagctgtgcagaatctggcaatctagtcaaaaccccaaaaggaggctgctattaattatccattcactggtttaaacagatagagcctgaaggcttgaagagttggttgttctagtaaatgtttgtaaaattcacatgcagctctaggataaccagcattttccctttcagaggaggaaagggcgatattcgctcttaccttctctgtagctacgtttcgattttgcagcacccgtgatgaaagagaaagcgcttctaggatgggtatagcagacagtgcgcttctaggaggggtgcatccgaactcgcaggaaggggcgcaactcctgcattttgatgtctttgtgttatttgctttgagtctcagaaggcagccgacattgtgtttttccctcatagtctgccctggttttttgttttgttttctttttttaataggaaaagcattcctgaatcagtaatgctctcaagttaacaggtagaattcagataacttctcaaaagtatttgtgtgttggcccagagggagaatttcagaggttaaaaataataatctttaaaacttaagataataattaagggccgggtgcggtggctcacgcctataatcccagcactttgggaggacgaggcgagtggatcacctgagctcaggagttcaagaccagcctggccaacatggtgaaaccttgtctctactaaaaatacaaaaatgagccaggcatggtgatgggtgcctgtaatcccagctactcgggaggctgaggcaggaaaatcacttgaacccgagaggcggaggttgcagtgagccgagatcgcgccactgcactccagcctgggcgacagagtgagactccatttcaaaaaaaagataataagaatgagcacttattaaaaagaaagactaacaatagaccatattatattgtttaaaacttttcatcttgctaatttcattgacttataaagaaggcttgagatagtcacaatattttaattcactagttaagattatctccatccactgtaggagactttatcaaaatctgactttctcctttaatgtaagacaatagcaaactgaattataaactttgttttctgattataattaaacttgaaattgtgtattttttctcaatatttccatatatatgatctcttcctgtaccataaatagttttaagaatttgcaagcaaacttctggctcctgtagtagataggaacaagagaagctgaagttcacagtagtggaaaatgtcagattattgctctgtgttgagaaaacagccacttttttgaatgagatgctaattcaaaaaggggagcaaaagagagtataatgaagaacctaacattatctctgctatcaaatcactgcaaatacatgcaaccccggaatagttaactgctctttctgagatgccgcttcaatttgggcttaaaattgctcttaatagtgtccttaataaagcctgtctaacagcaggtctggaaaaggcaaaatgatgaagatgctctatgctttgacagtgtactgtggaccaacattgttttgttacagaacattctaaaataaaaataaacatttgtccatacacatacacatacacatattaccaggcatatggtaaagactgctgaaatgtaaatctgcctaaaagacttgaggaaaatgtacttataggcttaattaaagtatatgcaaggaaaacatttgtggcaccataataatgtcttgctgtaattttacagcaatttccattcctttttcttgcctccacaaagtttcacagcagtaggatacaatttttgcaacactgaggcggtactaggtaggccttagtgactgggaaaagtgaacccgtctttccgaagggcgagtttgtttgcctactgtcagtgggaggagtgtaaatgaagacctttatccaaagccagcgtctatgaacaaggacagtatgtttggagcctggtcagtgatgagagtgataacgtacatgctctctattcactaagtctttaattgcgctctgttcagacactaaatattggctgtggtcattgcctgcccagtatgcgaaccataagctggggtggaggcgttgagtgctggcagcggacgcaacctcttgctcagccttcagtcttactagactgtgcccacgttcactccacaccttgctcggtgaaatcctgtttataggatatttgaatcagctgttaattcctgttagcatgttccaagcgtttcacaccctttttgtccattggagtaatcactcatggaaaaaaaaaatgctatcacagccctccagcatgcagagcaccacgctaagtgttggtgatcagcatccacccaaactctgacttgtgaaacttaggatctagtcggaaaagtgggtgtcagacaaatagttacgtgcaaaacatacagttttacacagtgtgtgacgtcgtgctgcaaaggaaaagtaaagcgtgtggcagtggtgaaactgaggccctggttcagctaagtgagccagcctcgggaggcctcttccgaatttatcacgtaaactgaggcctgaccgtgtcagttccctgcagatgcagtttcctacattatggtgccataaaaatgcctcttagaagatctaaaaattatgaaaaagaactattctcttagaaagtatcttcatttaatttttccagtgttatgacaacaaattgagataggcacaagttaattaaacttaagtttatttaaccaaggagagaaaagttaatatatagtcaaactgtgtccatcattatctcaggcctattccagcttgtaagaatccagtcccttcagaagcaagaacaagcatttctgtgccccgttgctctgttcatgattctattcatccagaaccactccccagtttcagtttagagaggaccaaaccaggaacggcagatggatcttacaaacaggatattggttgagctaattggagcaattttaaattgaaatgattgcctttatttgtcttatctttaaactgaatctcaaacttttacctcagttttttacaaataaaatgcaagagggaagttgttttactgttaactgattatagattataatgcctttttcttcatgttcttatttcaatttttcacttttgaaaacgttggacccatttttttaagtgtaactccccaaagaagaaaaaaactctatactaaaatttagaaacctcctaataataactgtcccgttaataaaaaagaaaactccatactaaaatttaggaacctgtttttaataactgtcccattaatgacggcagagcttctgaggtgctgcccggatgagagtcttgtgtaaagtgtgttagagcagcctcttttcctagtcaagtaggccttgggtacaaggatatgaaaaataagctttaaaaatttatttggatatatagtttctatattctaagtgtacatatgggtttatagacatatatatattcacacatatatgaatatgtatacatatatattttttaagctcttatctaaagtggtttttaagtgatgtgaagtttaacctcagcatcaaagtatattctaaaatataaaacaactattttttatcattctacattttttatttacatcaactgtatcacccattacatatttgataaagaggttatgcctcagtaattctgaagctgaaggcttaaaatctcagcccagtgactctggagaatcacgtgttagttaaagggaaagcggcggcctcacatgctgcgtaagtttcattctcaggcatcctttctgagggacctacttttactggagatcattctgctaaataaggtaacatctagcctcaatggcagtcatgttagttaaccccctaaaccttcaaaaatatgtttaaaattatgttaagctaaataaagaaaaaaggaaaaaaaacttaagaattctgtctgtaataatttctctatattgcaaataataacctaggtatgcataaataaagtaaattattgttccaagaaatctttattgagaactgagaaaagattttgtacaataaccctagtattgcaaatattgtaaatatttttacaaatacagagatataaataagaaagggaagagatacagttggcccgcctagggctaaaagtgttacctgtccagattatgtaatccacggagtaggcttcaggtgttcagaaacggcaactcttgatattttagtgtcaggtaaaagcaggtacatagaaacccaagaactagagtatcaatataaaacacatgagcatataaatacatgggcataaaaataaatgtatatgtttatccataaatcccaaagctttggttgacccttagtttatctaaaaaaaaaaaacaaaaaaaaacaaaaaacacacgagcttatagcccacaccactggttcccgtgactggaaatctaccttatatttttcagcaagcaccgtgtggttgctcatcctccagatgctgtagcattttaacgaagacaccctttagccattcttgttttgacaaggaaaagtaggagtccatttaatgttttgggctctataatatcacatgtaaaaattttaattcactatgatcattccatgagctagaacccttttatttttaaaaataacatgaggtgtcactggaattttgccttctgggattcaacgcttatatccaaaaagggctttgttcttttttgtttttgtttttaagtgtataaaagggggagtttgggccttttatttaaagtaaaagtaaattcctaactaagaaaatgtatagtttgtgcctgaactagtagccttcattcctaattgttgtgtgatagcagtagtttttaatctcttctcttcttgtatttgttagctcattacttttttctcaccttcttccctctccctctgcccacccatgccccacctccacatgctgcttctgggtactagaagtccagctcctccaccactactggggagaagatcacgaaggtgtacgagctggggaatgagccagagagaaagctctgggtcgaccgatacctcaccttcatggaagagagaggctctcctgtctcaagtctgcctgccgtgggcaagaagcccctggacctgttccgactctacgtctgcgtcaaagagatcgggggtttggcccaggtaagaatgagtgagggagggggtgaaaaaggaagcattgtggataagttcttacagtggctttctttgaatgtgtggactcattttttttctcacaaaggaaaagctaagcctgtgtgaaagtcgccttcttgcaacccacgtctgtgtgctgtcagggagcactgggggaccctggctctgccaccaactcgcagcgtgacctcagcaggtcatgttcttggacctcagtttcgtcatgtatacagcgggccagactagattttcctgtaggttttcttacagctccagaattctctggaatctgccagtagttcatagtaaatactcagaaatgttttacaaatgactgaattaattatctgtgtcagatataagtcacatttactgcttccctctatccagaacaggttagcaggaaaattaagtgatacttgtcaaaccatgcccacaataactggacagttaggagggccattgctgtgacctccagcgggctaggcctgaggtgtgacaggggagctgcctggggtgcagatttaaggagctatccactgtgtgcttgcttgactctcagagtgagtgcgtcctgaagtctcataccccaggcaccggctttcctcactgtagccctcgctccttaatcaggagtctagttgtaggaccacgccctgtcataggaacagggaaaaggtactcactgtgtaacctttgtctttctaaatacatgagtcaccagccccaaagcatagatgagaaaactcctgtgtaacaaaatcaagtacaggatggggtgcagtggcttacacctgtaatcccagcactttgggaagccaaggcaggaggatcacttgaggccaggagttgcagactagcctggggaccccagtaagactttgtctccattaaaaactacaaaacttagccgggcgtggtgatgcacacctacagtcccagctgttcaggaggctgaggtgggaggatcacttgagcccaggagttcaaggttacagtaagctttgatcacactactatactccagcctggttgacagagcaagaccctgtctcaataaaaaataatatattttttaaaaaatagaataatgctgtagcccagggacactcacagggtagttggtggggccaggtctgtctgactccagacacatactcttcccatttgccactggttctggagtccagctatgcattagaatggcctgggcagcttttcaaagctgtcagtacctgggctaccacccgacatcaatgaaatgaaaccttctgtgcccaaggtaatctaacaggcagtcagaatcaggcgccctgcgccccaccaaggtggcgggggtcactaactatccaagggcaagtcatctgccctgcaggtgtcactgacggcctaccgtggtctcagtgctgcgtctcgggggagaaaggggaggccttctttgtgcttagccttcccactaggtgcctaatccattccatgggggaactgagacctgtgacagaaagaattagagcttgcccatgacgctgcataaccagctgctaagtcgtgtgataccacgtgtgagtgatggtcagcaaagagaatgattgagacacgcctctctctgacctggactccctgacctttcccctctgcacctgggctcctttgccttctgcccctggactcccctgacctttctcccctgcacctagcctcttctgacatggattttttagaatcaccaagactgctcaaacgattagattttatcagccagcacagagtagatagtgtctggctacttccttactgtgactgtgtccacagtatatataaccaggctgggtctgtcatgagactctccgcgggcttataatgagggttgctggaatgtagctgggttgcatctttgtccccaccccatcatgctgtgtaccttgtgggcatcagatgtggttgggagcaggtgctgccaccacacaaagctcagctcccagccttccttcttaggtcacactgagcagcgcccagcttgccatttctgaagtaacctgaagacccacagtttgcagccctgcattcagtgccaaaagagggcggtgggcatctccgggagcatccacaatttattatacaccaccgagtactaagtaaatggacagaagagccgtgtgagaaagtttgaacccagaaatttaatatttcattaaaaaccactgtccccttacctcctcccttgccacacaacgcaggagacatcaaaaggcaaaaccttccccaagttatttgcaaatcctcatgtttcatccatgtgtttaaccgtttaacctttcataacctgttcccaagtgggaatcaaaaggttaaaataatgcctcggatcttgacgtcacatttcaggagttctctttctttctcctccttttgcgactgtgttgtctccagccctttaagcctccttgagtaagagcaccgcacaggaaggtgtgcacctgccccgtcagcagggctggtggccagtggcatcgcatcatgctttttaagttgggggccgttggtccaggggctcatttgcctttgcacgaggtgctgcttttgcttttgcctgacaccccaagcagtcttggggtgaggggatgggtacggcccagaatcacaggcccacttctgagggcttgcagctgctggaatgagcactttcacatcagtgcccaaaaacctaacttggaaaatagtgccgttgttgctttttaaatgttttgagatgccctttttccttaattggaggtgcagtgggatgagcgtgaggcgttgggagatgtggcgggcagaaggacctccgagcagtgctttttctgttgccatcagcaggttccctaatggttttataactgtaaatgctgcctatgcactgctgagtgggagtaatgagcattagttaaaagaggcaaatgaagaaaagtcaaccaagacattaagtgctttttttgtctcctggctttaaacaagccactttgttgcaaaccaatgatcctgccgtgtttttcactaggttaataaaaacaagaagtggcgtgagctggcaaccaacctaaacgttggcacctcaagcagtgcagcgagctccctgaaaaagcagtatattcagtacctgtttgcctttgagtgcaagatcgaacgtggggaggagcccccgccggaagtcttcagcaccggggacaccaaaaagcagcccaagctccagccgccatctcctggtaagtggcggcgctgcagtcactggcccaggaaagcccaggcgcctggcctgggaggttccgggaaggtggtttcacagtcaggccaacagggaacttgggacttttgagaggtggggggttcctgtgtcgttttgtttatttaattggacgcccactggcagtgttaagggatgagagaattaaatctgggatatggccatttctggttgacacttggaaggcaccccttcttttgctttaccttaatcaaaacaggctttcgaattctaagccatatacgtttattgcttatacaagtattcaaaaagattccatctacctctacacaaaataaagatcccccagtggccagtttgaatacatgtgcacttctaggaaatgccaccctacaggttcgacagctcgagctcccccgccctctttcggaaatcctcagatttgaactttagtaaaatgaagcctgggcttcgtttctaatgtcccctacccagcaagttctcacttctagggaatttaacaagctgtcgtggtaaggatccacacggccttgttttggaaacaggtggtcttttgcagccttgttctggaagtcaggggtcttaggaatgggtgcagcgctggccaccaacacgctcgcaggccgagccacatcagtgacgcctgctggctcccttccctctcctccccactgacagagaccctcccattcctttcagctcccctgccagccttcgttctaccgtttggctttcagatttgaaatgacaaaatcatatattctgataaatgcaatagtagagaggggaagaaattggcaccttagtgctgggtggtgaccttactccagtagatccgaccattctcttatctgtgtctgcctcgcagtcagcgaccttcagcacattagcctcactgttcctggtccctgtctatgagatgtggctgcacccaccgctcctgtacacagcttgttctgagcgtggctggcagcccatgtttcctgagcacttccagtgtgctgggcccttttctaagtgctatcatttcattttcacatcagccctgtgacattgatactattttaaaatccatgagaaaatgaaggtctcgtggaatctaagtacttgcccaaagccaactagctggggagtagaaggtcttatctggggcatctggtgctacagtatacacgatacccaccagacacctctggctgtattgaaaatacctttgtaatatgtgaaatgtttacacatagaagccagagaaagaggtcatttcatttttaatgatttcctctagctgctgtctggatggcaaagctgatatccaaggttgctaatcaagggatctcacataaatacgttttaggcccaaagtgcacttgtagtgaatatacctagaattacatctgtaggctctaaaaacaagtagaaatcctcgctaacctcatccttaaagattcaaaggctttaccaactcaggtgtcccttaaaaactgggaaatctaattttaaaaatctcacaacattacatccagttcacagagtaaaacaagctgcctgtgaacagctctgaaactatttttccaaaataaaaacccagtggggcgtagggaccaaagtggtgatgtctgtaaagatctaagggtacattttatttgccaggaaagaactcgtgtcactgaatgggctgcacttgtgtatggagaatagctctcccagtgtgcatcagcttcaggacgggggccctgctgaggcgtatagatccttcagaaagtggagggcctgttctcttaacagccagccgttcccttttccccttttttaaactgtcatttttatggcaacattatcattttaactacacaaaagagcttggattgcaaatggactcctggtatacattcttctcagtagtccagatggagccgagggcctgtgacacaggaggcagtggaaggaaagcctcctggtctcgtccagccccgagagcgcgtgcagggggctccaggcacacacaggcgtctgggggtcgcaggcagaggcaccctggtcttcagaagcctctcgattcactgccacccacacagcaggtggcctctccgattccagtcccatcattagggaaagtgtctggaaacatttttgttgttaaaggaaaataaaattattcccaactattggccatgttagagtctcatttattacaagatttttaaacacaaatttacggtaaaaatgtatgttctttgaagtcactttttcctggaagaacataattatagtttattttttaccagcacattcaggcgaactaaactaaaagattctgaagaaacattttagattttttttcacccaatggttgctctgaaccagctaaaatcctaagtcttttgactgtattctaagagcactctaagtcatctgtctctagtcaggtttcaatttggggtgctaatacagctctaggcttcaattctgtcagcctctgggaggcataagccccttggcccctggggctgcaccccacatatcactgccaagtggctgtgtggcttctcacaccggatgtctgggttcctgtcttccagccaccagagcaagtcagtgattgagactcccaggtgaaccaaggcaaggccatggggtgtggtttgtgtctttaaggtgccagtggcgatcttgttataaagcatctagaaaaggttgtgggggagttccaatgagcgctgtaggaagcacctccccagcctgtaagctggagatggggaggggaatggaagggaccaggctgggagaagtggggcaggggtggggcatggagctccacattcggttaataagtctgtaaccaaaaacccatccatcttggctggcaggtggctgactgaatttctattattagctgacaggtgatgtcacaaaacctgtcatggatccaactagggaatcctcagtggaagataaatgagaaagggactcaggttataaacagaggtgccctctggttgacctctagtcactgtagacctgggacatatcagctattccttctccccaccctacttcgctcaaccccgccagaactagggcaccaggttcgtgccgggtaaattatcttcccagctaggagcctggccatgctgtctgaagtgtgtgaatgtacttaaccttcagtaacctttccattgtttactttagagtatacatttgtagcttctggcaaaaggtagggatgtcctagagagcctgccagcctcctctattaatggagttacaagaggttgcattcattttttttttttccatgaaaggaaaggaaaaaaaaaacactggcaagggagatttttcctttttttttttattagctataaatgtgaatacttgtaaataagggtctttctgaaatcaagccttgcaagtgatgtttccaaggaggctgtcggctggagcggagcctgcctgaatttcgaaagcaagtcatttctcttctgcagcactaggcgggcaaccatgtctgcaggattattacccttttatatctgcaaaagacggctttcttcctttactccaatatacctttttaacatgtgtttccagggttttacgcaaatttggtttgtaagtatgagtgaatacatttttcttttaaaatacctacaataagtgtcaatcttctctgtataacaaacccccatgacatgcgtttacctatgtaacaaacctgcacatcctgcacatgtacccctcaacttaaagtttaaaaaaaaaaaagtaaataaaaacttttttaaaaaagtcagtctttgtggcatctctgagaacttctctaagtcattcagtgcagggctcacagggacggatgttacgcagtgttcagctctgttggccagcgttcattccaacccaggccagaggctgggcagacctcatctggctaggaatgtctctgtctagctgaggctttccgagtagaaataatgtactcattttgatttctgactccttcccagtgtcctctgtaacctctcgtggtttgtttcacctccattgccactagagtaaaatgtgaataatggtagttgtagtgagccttgggaacgtcataggaaaggcattctacacaataacatggaaaacgttattcacaagcagcagtaatcctgccatttgttcggggggttctgcacgtttttatcagaaactccatgagggcaggggttgttgtctttcttatcagtttggtccactggtgtatgtgagcatagaagagaacctagactatagtaggtgtattactcatttattaagtatttgtttaattcacacatgaaaccagtatctattgatgatctggcgtgctaaggactgcagtagatgacagagcaggagccctgcaaatgttacgtttttccctcaaggtgaggttaattaatttttccaagagtcccacataaggtttggaaaaaatcagttcaattctgttattataatgtaattatacttaaaagccaaatctcagcaccctgataacagcattaaaaaaacgccaaaccagtatgacttgtgctttttgataacaaatctgatttcataggtcaaaaagtgacactattaatgacagcacagacacattcagatgttgagaagctattgaaatgacataaggctcattgttaatttgtgtccttgcttttcatcttaaacatttcacattgtctaagacccagaactaagttttctaatttcgtttctaaaacagcacaataattcatcgagttgatgcacaaaaattttcatcccatttataaaaatgtacatttagattatttccagtctagacaacagtgaatgaacactcttctgcctaaagcctcctttttattagattattttcttgggataaataccccagaaaataagtatccagtcaaaagatataaatgtgttttatggctcacaaatgaaatatgttgccaaatagtttactcaaaaacttctttactaatttttactgtaaacaatagaaaagcaacgaattttacaacatcattatcagcaatggctattgttactgtttctaataagatggtgtcttatttacatttatgtctttcatctgtataactagcaaggcagctgggcttacttgataatctctggatttcttcctgtttctcttggtgctgctactatcagctaactcgggatccttgcaaggcccacagaccccccagtcaactggcagcaattccatggcagaggttccaggtgacctgaagccacctaccccagcctccacccctcacggccagatgactccaatgcaaggtggaaggtatgttcaaataactctgtgaggcatacaaagtcacatttgttcatcttttagttttctggggcaaacttcacagagagaagaaatggtattccctagagagtttttaaatgttgatgactgccagttttcttcatgtcatttatcttgaatggtttttgcatttgcacatttcaagatgggttcatcttctgaatgtactgtttggaggtaactcctgctgtatcattaagctttcattctttgcctctcttcagaagcagtacaatcagtgtgcacgacccattctcagatgtgagtgattcatccttcccgaaacggaactccatgactccaaacgccccctaccagcagggcatgagcatgcccgatgtgatgggcaggatgccctatgagcccaacaaggacccctttgggggaatgagaaaaggtacgtgtagaggggcctccacccggccatggaccagtgggcattctactctctgccgttccacaacagttcacctttcactcagaacacctctgagcccatgctgcatcggtgtgggtcccaggtccccatcctactccacttgtggccttgggaaaagcagttagcctctttgtgccctcatcctgtccccggctggcctcagtgccctcagcctgttccctggcacatgctccctgtttccggatacctgccacctccttacacgtgccaagttacgttcctcatctagaaattgggaaaataataggacccgcttccaaaggcatggcgaggattaagttcctgcaacagagctcagagaagagtggctggcagccgcggtaagtaagcacgcacttcacggcacttggcatggtggtgtgctagtgtgcgctgggcgctagctcgtggattggtaaatcagagtcgctgcccaccttcagggaatcacagactccctgccttcttacttcctgggaggaagcaaaaaataagttaagcacaaataagcagttaaagattgtggttggtggaagacaggaaagtgaaaggaagaaaggatacagatagcagtggcactgggtggcgcggtgggagagagggaaagcgatttagactgagtggtcgggagggaagggccctgaggacctgttcatgggggtggtggtgggaatgagcttggtgtatgaggaggtggtgggtgtccagagcacagtgagcatgggcccggggacaggctgaggtcgttgaggccggcggggccaaagcctttcggtgtctgtgggcgtattgatgaatctggatttttccccaaggtgaaagatgttatgcagggaagtgatgtgagtagtttttttttgtgataaataaataaatgactggccatctctggagaatgtactggaaagaggtaagagtagctttggggagaccactgtgagagtctagggggagctggccaactggagccggacaccagcagcacagagggaacccgccggcagagtgtatgtcagaggtgctggtggagtgaacgcgggccctgagggagaagctaaccgtgactgggcgggtgaagacattattccctgcaatgcagaggattggaaaaggaccgggctagagaggggaacctggagtccctctggggtgtgtcccggtggtaaggcatggagtgcatggctggagctgagcagatgttgggatcggtatgatcttggagtagtaagtgtagaaatggcatctgcagtgatgggattgatgagatccttgagacagagagtgcagaagtttatgactgccatcaggagacaccaggctggcccttcccttgatgcctgccgactcccaaggttgaggtggcactgaggctgtgactgtctgagccactgtccttcagttctgcccgtggtctacaagccacaagtggagacttgatattttgctcttgcgcattcttccaagtgcattcaaggcctgtgaaattgaagcatgatgtgtatattattggaaaaaaacatatagaataaatagtgaataatatttttatggaaatacttactctggaatcccttaaataatagtacctgtgttggggtacataaatttcttgataatattgtctgagtggagagaagcataaagcccaaagccttggttttcatatgtattatagaccaatgaaaaagaacaatggagagtctttaaaatttgagtatagggcatataccatttaaaaatgaaattcatagtatttcatgtacaacatttcaggtaacactcataaagcaagatcatctatgatttttttctttcaaaagtttcagggctgcttattccaagtgaggattttgtaggacatgcagtaaatccataagcttagaatttcaaaagctttgtgaatgttggggtagctgtttttcttagtggtatgagatgctagacagaacatttcgttagtgcttttggtggctttagactctgaaaatatgacaacatggaaaaaaataattagtagtatttagaatttggcctcaaaatgtattgcaaaccattcccatatcccaccgatacaccacattagacaactataggtgtatttccctcgtgtcctcatgcctagaatttcttattacaaaaataaatttgtgggggtggaatgattctgggatcaccttgctaggccctaggtagatatatgcagatacttctcaccttacagtggggttacatcagaagaaacccatcctaaattgaaaatattggtaagttgaaaacacactttcacttacgatatttttgattgacaatgagttgatccggacataaccccatcttaaattgaggagcatactgaatgcctgtcgctttcacaccatcataaggttgagccatcctactttggtgactgtctgtaatgttgttttcatcaaccatgtaaatgatccccggtggcaagtacaatccctagtgtatttcagttcacctgctgccttacggtattgatgtattcagtaccaaattaaagcagataaacagaaaatccacgggaaacacattttctaagagtcttaatcctgttgtgtatagttttccattcttcagtttgccttactctgtcagtaaacttaatggtgctctgattttttatttaatgactaacttcagtggaaaacatactctttgtcgctgttgctgctgctggtggtgttaacctgtagtacaagtagcatggtcagagtctgatctaatattagccctcagtagccctgaggggcctggccctgcctgttcaccggcctgccttccctgccttcttacttccttacttcactgattgaggcattgattgattacatataaatgaacatcattttgtatgtttaacagaatagtatatatcgaatttatattattatctgtacacatagctctactttttttaattgaatagatacaccctaatgctctagtaatgggtgagttgttccataatcttttctattataaacaatgaagcagtgattgttgaagtacagttttttcacattgtaagaatgtttctgcgaaatagattcctagaagtagaattgttgaatcaaaggatatgaactttttttttagtttactgagtatctcagcttttacagtataacaaactacccccaaatcttagtggctttaaaaacagtaacacttaattatatctctcagttctgtggtagactgggtagttcttcgctctgtgtgtcatgttgtcagctaggatattgaggtggccgccatcatctgggagccaggctgagagctctgctgggctctgatgtctctcaagtggctgatgtcatccccaggctctactgggacctcaactggagctgttggctgcagcctcctccatggggcctttccatgtagtttcttaggtgcctataacatggcagatggatttcaagagggagcactccaagaggacaggtcccgggagcaagcagttaaaaacttttgcttgcatctcacttgctggagccctcttaggcaatgctaatcacatgaccaaacccaaaggcatcatgggaggggtttcccaggctgcgaatgctgggagatgcacttctttgggggttgccaaagcacagcctcccatagcaggtaaagcaggtattggcaaagcttataccagcttaatgttctcaacaaaagcatgtgagagtgtgcgggttctcacccccttactaagaatgatcattgtccatcattttaacattggccaatcagatggaagggggaaggcctcattactgtttaccttggattcattccattattagtgaactcacacatcttttcatatgttgattgaccatttgtttttcttttgtgaatgttcatttatgtgtttgcccatttttaatttgattgttgcttttcctgttgatttttttaaatttccttgtgtattagagaaaagctatttaattatgtcacgtgatttctttctatctctgttttcacatctacaaaatagaaagtaacttcaaaactggttctaccacaggttgatgtgagatcaaatagataaaacaggtgaaagcacattgcaaaggaaaatacttgatgctggcattggcccctctctaccagcctaacaaaatgtatctactcatgaaatcttaaccagcttttgcttcacataacataaaagtaactatcataggatggagaaaggtagcaatactgtataacgatgaaaatttatattaaaatgtttaatttgccttcaggctagtttctggactgaacacaatttccttcaggctctgagctgatgctaatttgcatgtactacctacttgtcactccatcctgtgttagaaatagttgtatttcatcccatcttgagctattcttaactccttaataatttttttaatccttattttggagtgaatcagtggctgaatgttaaggttttcaccttttttcttatgggagaagggaactaactttgtatacatattttatgtcctccttacaaccatttcatgagataatattactggcctcattttatagacaagaaaataggggccaggtgatgactcatgcctgtaattctagcacctcaagaggttgaggaaggcaggcagatcacttgagcccaggagttcgaggctacagtaagctacgatttcaccactgcagttgcaacattgcacctcttatcactaggtgatacagcgagaccctctctctaaaaaacataataaaaatgttgaaaagaaatgaaattaaactcagaggtaacttacccaagtaaggaatggatctgggcctgtattagttttctatgttgttatataacaagttaccacaaacttagcagcttaaaacaacataaatgtatgatcctccagtgtctgtggatcaggaatctggcacagtgtgactgggcctctgctcagggtcccacaggctaaaatcaaggtgtctgccagcactgtgagctctttgaaggctcagggtcctcgtccgagtttatttaagtcattggcagaattcacttgcttgtgtttgtgaggctgcagtcccgttttcttgttgactatcttctgcccaccttccctaacacgtgatccccctccacagcatgccagttgcttcttcaaggccagcaggaaaatatctctgacttgcttcctctctaagctctagatccaaacttaaagggctacctggacaatctcccttctgtttaaactcacaatcggctgattagtaactataatcacatctgttaagccccttttgccatgtaacatacataacataatcatgggagtgataccatcgtattcataggtcccacccacactgaaggggaggggctcatggaaggtgcccaccgggcagggggtgctggatcttcggggccatcttagatttctgcccccacagagcacatcttggctccacaacttatgctctttcaatagtattatggtctatcatattaagaaaaagtacaggccaggcgcagtggctcacgcctataatcccagcatgttgcaaggctgaggtggatggatcacctgaggtcaggagttcaagaccagcctgacctacatggtgaaaccctgtctctactaaaaatacaaaaattagccaggtgtggtggtggatgcctgtaatctcagctacttgggagggtgacgcaggagaatcgcctgaacccgggaggcagaggttgcagtgagccaagatcacaccactgcattagcctgggcgacagagtgagactccatctcaaaaaaaagaaaaagtccaaagacaatagagatgactagaagggatggatgggcctttgactttcagaaatgcctaaatgtatgcattttatttaaaatattgcagtgcctggaagcagcgagccctttatgacgcaaggacagatgcccaacagcagcatgcaggacatgtacaaccaaagtccctccggagcaatgtctaacctgggcatggggcagcgccagcagtttccctatggagccagttacgaccgaaggtgagtattttttaagatgacaatatgatgatttactagaaaccgtgctttcctcacacacacatttctgagccctggcagctgagccactgatgacaatatacagtgtcccctttcctgtgaaagtaaagaggcaatggctgctggtcaccaggtgagtgtcaggtggctgccctcagtagatggctattcaggaccagggagaaggaccttggccttggtaggagtcttcttcccgaagtcaagagccagggccgccacaagtcacgctggcacccggcaccagcacccagcttccttctgagggactgccagctgcacactccagacatggctcgcctggagctcctggatgcctgggcctccacagcacccgctcccctccctcccttctttctgtctgggggaaaggcctgtgcagtggtagccacactgggctttcagcattctggaaaggtcttccaggcagtgcttttcccctgtgaatattttaaacagagggacaatactttgctctttaataaacatctctagaaaacccacagcacaggcctcactgcagcctcgcttaaggaagtcatcttgaaatgactgaaaatggcaagttaaacttgcaagttaaaatggcaagttcagctgcaggactgatgatgcagagtgatttgtaactagataggaggaaaagttattgaaatggctctgaaaggtaacctgaaaactgcttcctaagatgatggcatagggtaggcttctttttgtgaagaaagtcccttgcctgggccctgacttcaatactcattgtcacaaaaaccccttccccttgttgggtatgttctctacctcctagtaagagacatgatgataagcaaggttttcatataatatttcagatttttaaagaaaaaagatagaggcataatagaagggcttttccctccccggagccacagtgtgtgccacagggtggagctgacttcgggatcgcggcttcggaagctgcgtgtgctgttctaccggggaccggctgggccagagccgctcacctttcatcagcccacatgctggggtcacagggatgggtcagtgggaaagcttcctcagtgtaatacaaaggagaaaaaggttgaaaaatcacggctttaccaaatgaggtttctttatggtattgtctgtgagccttgttcttgagagtccatcccatgtttaaggagacacggtgctttctcctagggacctaggaatttactcttctaattcttaacccggccataatacggccaatatttacttgtgatatattcgttaatcagttaaccataaggtaacatttagtgtgctgaatcaaggatttcagttaggtttgttttgtttctgagggtccaggaaaagctacagatgtttttttggggggggtagctggcaagattagaagaacaattatctgggctctatctaccacattaaagagaggtttacctcattgttaagttttctcttctgaaaaatgttgcttgttaggcaacttaaattttacccatgtcaattacatttctttcctcctatctctgcatttccttcttagatatcaaagtagttatcaaaagttcccgtgtctgtttcacatgtgatagtctaaaaattcagttatttgtttttattattctcattccttgatcagcttaggaatatattcagtccattgttccctttcttacaagatttagtatattaaaccaatgtatttttcaaagttccaaatctattgtcttttaaaacatgctattttttatggtatttataatttcttaatatactagtagttgaaaaatgaatgtattattcatttccattttaagatgtaataggtgtacatttgaatcatccctgttattcttttctggagccttttagggcataggactgtgaaattctgagcacttgtatttatataatgattagctaacatttgaattaaatttgaagtatagcttttaaaaattaaacattttccattcataatgagaatgtgcaaagtacaaacattttgatgttctggcacttgtaggaacattgcctttgagtcttaagttcttcttgctgtttcttgcttcccttaatgcctgtcatcacagcactgtacgacacttcctaaggtacacgtcagtggacaggcggggctgcggcctccaagcagaggccagaggctctaacaagtgcttacagggtgcctgcctgctcaaccggtattcctctgacacctattagccaacagcccaaactaggagcttggcaccattcccaaaatgggtgttcccatccctggtgctaacagttggcgtgcagctgcctctcagagggcctttgtcggaggggtgcgcagtaaaagccacacagagctgcttgagggagtcagggttccagaaatggattgtttatttctctgtttgcctgaagctttttctcagttaagttttctttgaatgcctcattccaggcatgaaccttatgggcagcagtatccaggccaaggccctccctcgggacagccgccgtatggagggcaccagcccggcctgtacccacagcagccggtgagttggcaagtgggcgtggggtgctgtgttttctggttctgtcctggaggctaaaactcaaacttgtcttacttctgaagattttcagacatctaacaaaaatgattagtgtttgttgagcattcaggatatagttaatgctagaaagtactcctgggatgttgaagtcagcaaattaaaaataactcttgatacacggtttcttgaaacacatatgacctgtaataagaagttgagtgtattcatccttgtaaataataacaagcccaagctagaattagtatattttaaacatgtatctattgtgcatactgttgtatcagaagccattttagaacagaaatttgtcaatgctttaaggagaatgtgtagaaaagcaacttaaaatattgtatactaatagtgaaagtgaattggcttatttaaaaatgagataagatgctaatgatacttattttgaataagtaggacaggtttttgctggttcacaggtgaccattgcagctcagagatgctaagttacgcaggatctcccccttacagtgaccagtgccgctgcaggaaccgcccttcgtggtgtggctttccagacatacaggactttgctgtttttaaaaaacttttcagatctgagaactcttgcaaaaaataaaaattttgaaaactatatatatgttatataattataataattatatataataatatgtatatcatttttcatttatttaattttgctggagcatataggcacaaggaattgctttttttctttttttgagatggagtctcgctctgtctggaatccagtggtgcaatctcggctcactgcaacctctgcctcctgggctcaagcgattctcctgcctcagcctcccaagcagctgggactacaggcacccgccaccatgcccagctaatttttgtatttttactataagagacggggtttcaccatgttggccaggctggtcttgaactcctgacctcaggtgatcctcctgcctcagcctcccaaagtgctgggattacaggcgtgagtcactgcgcctggccagtgaattgcattattaaaccaactgatcttaaacagttttcaagtaaagtggaaaacatcagcatctcactgcctcccatcagagtcccacctaccccgattaagcactggtcccggagcatcctgggaagcaagcttaataacaggtgtggtcccagccctgtcctcagtgctgggaccagtggggctttgggggagccacacctgaccaggccagaagtcagggcaggagccgtgggatggatgttgggtgacacgggccagtctggggagccgagtcctgttcgggggcttttctgtaaaatgaggcccaagaaacccttttaccccaagaccctttcaggccggcccctggatgctggctttcctgtgagagggtccttctgcctcctgctgtggtcctagtgcagctcccagcccgggagccgtctgcctgtgtgggagttgaacgctggctgtcccggtggcacagcctaaggagaggaggcttttttttttccacaggaagtttcaaacacgtgaaaacaaactttggatgctctctcctcagtgtgtgacatggtgtatataatactgaaatattgaacataaattgttagttctctgttgttataggagcttcccatattcattttgaaatgaacattctagcaggtaataactattttgcataatttcagtgtgtgattatacctgtaagagcacatcaggatgatttgtctttctgtgaattccagaattacaaacgccatatggacggcatgtacgggcccccagccaagcgccacgagggcgacatgtacaacatgcagtacagcagccagcagcaggagatgtacaaccagtatggaggctcctactcgggcccggaccgcaggcccatccagggccagtacccgtatccctacagcagggagaggatgcagggcccggggcagatccagacacacggaatcccgcctcagatgatgggcggcccgctgcagtcgtcctccagtgaggggcctcagcagaatatgtgggcagcacgcaatgatatgccttatccctaccagaacaggcagggccctggcggccctacacaggcgcccccttacccaggcatgaaccgcacagacgatatgatggtacccgatcagaggataaatcatgagagccagtggccttctcacgtcagccagcgtcagccttatatgtcgtcctcagcctccatgcagcccatcacacgcccaccacagccgtcctaccagacgccaccgtcactgccaaatcacatctccagggcgcccagcccagcgtccttccagcgctccctggagaaccgcatgtctccaagcaagtctccttttctgccgtctatgaagatgcagaaggtcatgcccacggtccccacatcccaggtcaccgggccaccaccccaaccacccccaatcagaagggagatcacctttcctcctggctcagtagaagcatcacaaccagtcttgaaacaaaggcgaaagattacctccaaagatatcggtaagaattccaaagctttcattctgaaatgaattccagttgcagtgtagaattttaattttagtaaagatgctgttcctgctcatcttaaagggatgaaaaaattatgactagaagttatcaagatgcgtttttatataggagtaatatagttggaggctgctaatctgaattaagaaatagtgccagaaagattggccgggcgcggtggctcatgcctgtaataccagcactttgggaggcccaggcgggtggatcacgaggtcacgagatcgagaccatcctggataacacggtgaaataaaatggtagttttacgtgtgaatgttatttgtgtgaaagattagagcttcaagtaagagatcagggaatcctgagtggttatatgctgtattttgggcttaaagatttgaacttaaccaagccacttaatcactacaatacgtgcctaacagacccccccatgaggctaatgaaatgctaaaggtgacctgagaaaatctgaaggcaagccactctgtaatttggtgacaacatacagtgaatttccgtgggaaaaagttaaagcttgtatgtaatatgtagattgatagatggtatgacataaagaatatgctatgctgtgatacatagaactgatatcatccaatgcactggtagacttgggccaagaaccatgtcaatcgaatgctgatgttgcttgtttatcctctgtgggatgttctgaatactaatcagaggtctggactatctggaagtacacacagggtttctgcattatttttgaagtacttttaacacaggaaggaagataatagatctgagttatattaggaaaaattactcaaaaaatatcaagaacaaattgacttaaaatctttttcagtgattagaaaattaaagatattaataatttgaaagacatcaatcactggacattaaggagatgtagattgagagaccagggcaggagaatcacttgaactcaggaattcgagaccacccttggacaacctagcaaaacctcgtctctactaaaaagaaaaaaaattagccaaaagtgagattcatttctgtagtcccagctattcaggaggctgaggtaggaggatcacttgagcccaggagatcaaggcttcagcagtgactgtgccactgtatacacacacacacacacacatattcctttatatatatctatccatttatatataatgcatgtgtatctatatccctttatatatatatatagatagatataaatatagatatatagatatatatagaatatgtgtgtgtgtgtatttatatggggtgcagagggnnnnnnnnnnnnnnnnnnnnnnnnnnnnnnnnnnnnnnnnnnnnnnnnnnnnnnnnnnnnnnnnnnnnnnnnnnnnnnnnnnnnnnnnnnnnnnnnnnnnnnnnnnnnnnnnnnnnnnnnnnnnnnnnnnnnnnnnnnnnnnnnnnnnnnnnnnnnnnnnnnnnnnnnnnnnnnnnnnnnnnnnnnnnnnnnnnnnnnnnnnnnnnnnnnnnnnnnnnnnnnnnnnnnnnnnnnnnnnnnnnnnnnnnnnnnnnnnnnnnnnnnnnnnnnnnnnnnnnnnnnnnnnnnnnnnnnnnnnnnnnnnnnnnnnnnnnnnnncagtatgtagctatcttagaaaattttaaaacagataaaataaaagtggaaaagccacggtgtctccccctcatgcaatgattcttggtgcctggagaatgcccccagcctccaggcagctccagggatctggccgagctgggtctcatggcaaatcttccaaactttctacctgatcattttgtttccttcagtagcaggaatagggaaaacaacaaattacttcccattctgtggctccagccatactcctgagaaatctgagccatcaaagtgctaatatttatcacagcatgttctgagggcaggagcacaggactagaggaaagcagcctgggaagccaaggccgtgtgtctgaggaggctgtcttggagttaaattttgcttccatgttctgcatacttggcggccttccaggacgccaccttgagacactcgtgagtggtgaagccaaaagaagacaaataccacttttgggtttgactcatttattaaaagctctgataccacattgcagactctgtagggtggctgaaagaaataacccggccatgagaaaggaccatctgtgctcaaccactccacctccagaagcactttcggcccctgcgtgaccaacaaagcgagatctgaaaccacaaaagtttctcgttacagctatggcctccatttaaaatcggaaatgatcacgcttaactgtccttgagagcatttgtttaaagtcaatatttaacttaacactccacttattttttcttactctttcgttaactttcgttctttcatgcatagagtcaacattcatgatatccttgttcttccccatcttcagttactcctgaggcgtggcgtgtgatgatgtcccttaaatcaggtcttttggctgagagtacgtgggctttggacactattaatattcttctgtatgatgacagcactgttgctactttcaatctctcccaggtaagccagcatagtccaactaacaaccaaattaggataggagagcatcaggccatgcacatttgtgcttgaactaatgcctgagttgatgagcactgaccgtccaacactgttaatcactgcagttgttatcaaccagccttaatcaatgtagagttatctgggataatattcactgtagtctttagtgtgtgtacacacacatacctctatttcttatgagagaacagtgactgtgtgtgtatgtgtatatgggatagatgacagtagtaacattaaattgttcagaatgaatattagctggccaatgggaagaaatcaaaatgtaacattaagttgtgactggagtcagcattggaaacacagttggttgcaatgggacataaccctgctttccaggaggacttgacatcttcttttcattaaaaagatattcaagatttagaaattttatattctatacatttatagaatgtataaatatatatagaaggagagagagcagtttaatgaacccccatgtacctgtcagtcagctaaaatagttatgaactcatggctaaacttacttcttagtctatgctctctcatttctgcctctctccaggttattttgaagcagtcatgtaaaagcctactacttttaatgagcttaaacccctcctttgttcagaggtaggcttcaggtagcttccagcataatagctagaagagaggagcactgaagtttggggaaaatgcccgagtccactgggctatagacttttaaagaaatatttagaaataaaaaatggaaaaaggtcattttccctatagtatacaaacaactctctactttgagtgcaaaaactaaaacacttaatttccttgcttctaaggaaataagaccagaatcttctacttctttcttctctcatttaagccctcattatcagcctagaaaggcaatttttcaattgctagaaagtttattaataaggtcataaacattgtacgagttctgtgttaacagaaaataagtatttaaaaactgtatactgcatttgctagagtaatgcgctttcatccttatgttaggtgaactgttgttgatcacatatttgcataaccagaattgctttattaactttcccttttcccctggaaaaaaaagggaaaatgcccttggaacattgtgccttcagcacactaaaagcagttctttctagttggtgctgggggcttcccctgacttcttaaaaattgttccaactctactttcaagaaactgacagtaggatatgaaggtatagctgatttccagaacatctaccgggaaagaatccttgttagaatccttgttacttactctttagagttcctaaacatggtggggggtgttgggagagagggcagttgctaatcgtgaagtgtattggttttttcttggtacagttgcttaaaggaaaccaaacttgttcttgtagtcagtggttctctcatagtggtttttgcctttcagctagagtcataaataactgaaatgtaaaattgcattttatgaaacattttaatttatttatcataggctaaattgatttgtttttaattttcagtgttcatgagctaccacattgctgaaattatcttctccaaaagatatatagagaacataaattagggtgacctatggtacctgagacaaaaataaccataaaatcctaagaataacaaccataaaaatcccggcaagcaagtctcagataaataatagaagagaacagagtcactttgggcaaaagagtctataaaatccatgttcccactcttctaataatgagtacattgtctctaaatcaggaacagaaaggtaaagaacagcaaggcactccctcagtgataagattagagatatgagaataaaaagtaagttttcgtgtagatagtctaagcaaggaagcagcaaataaggaacatgctaaacatcggtttagtttatactgtaaaattcaggaagttcgctggacctgaagggtagtttatctttcatggtccagccaaaaagggagacaaacgtgtgacaatgatggaaaggtattgacgggtctcaggatctttaccctcctcggtcatatctgatgtcatgacattgtacctgttctttctttcttctcctcctcctcctctccagttgtctggatttctcgaacttttagtcgagtactttagaaaatgcctgattgacatttttggaattcttatggaatatgaagtgggagaccccagccaaaaagcacttgatcacaacgcagcaaggaaggatgacagccagtccttggcagacgattctgggaaagaggaggaagatgctgaatgtattgatgacgacgaggaagacgaggaggatgaggaggaagacagcgagaagacagaaagcgatgaaaagagcagcatcgctctgactgccccggacgccgctgcagacccaaaggagaagcccaagcaagccagtaagttcgacaagctgccaataaagatagtcaaaaagaacaacctgtttgttgttgaccgatctgacaagttggggcgtgtgcaggagttcaatagtggccttctgcactggcagctcggcgggggtgacaccaccgagcacattcagactcactttgagagcaagatggaaattcctcctcgcaggcgcccacctccccccttaagctccgcaggtagaaagaaagagcaagaaggcaaaggcgactctgaagagcagcaagagaaaagcatcatagcaaccatcgatgacgtcctctctgctcggccaggggcattgcctgaagacgcaaaccctgggccccagaccgaaagcagtaagtttccctttggtatccagcaagccaaaagtcaccggaacatcaagctgctggaggacgagcccaggagccgagacgagactcctctgtgtaccatcgcgcactggcaggactcgctggctaagcgatgcatctgtgtgtccaatattgtccgtagcttgtcattcgtgcctggcaatgatgccgaaatgtccaaacatccaggcctggtgctgatcctggggaagctgattcttcttcaccacgagcatccagagagaaagcgagcaccgcagacctatgagaaagaggaggatgaggacaagggggtggcctgcagcaaagatgagtggtggtgggactgcctcgaggtcttgagggataacacgttggtcacgttggccaacatttccgggcagctagacttgtctgcttacacggaaagcatctgcttgccaattttggatggcttgctgcactggatggtgtgcccgtctgcagaggcacaagatccctttccaactgtgggacccaactcggtcctgtcgcctcagagacttgtgctggagaccctctgtaaactcagtatccaggacaataatgtggacctgatcttggccactcctccatttagtcgtcaggagaaattctatgctacattagttaggtacgttggggatcgcaaaaacccagtctgtcgagaaatgtccatggcgcttttatcgaaccttgcccaaggggacgcactagcagcaagggccatagctgtgcagaaaggaagcattggaaacttgataagcttcctagaggatggggtcacgatggcccagtaccagcagagccagcacaacctcatgcacatgcagcccccgcccctggaaccacctagcgtagacatgatgtgcagggcggccaaggctttgctagccatggccagagtggacgaaaaccgctcggaattccttttgcacgagggccggttgctggatatctcgatatcagctgtcctgaactctctggttgcatctgtcatctgtgatgtactgtttcagattgggcagttatgacataagtgagaaggcaagcatgtgtgagtgaagattagagggtcacatataactggctgttttctgttcttgtttatccagcgtaggaagaaggaaaagaaaatctttgctcctctgccccattcactatttaccaattgggaattaaagaaataattaatttgaacagttatgaaattaatatttgctgtctgtgtgtataagtacatcctttggggttttttttttctcttttttttaaccaaagttgctgtctagtgcattcaaaggtcactttttgttcttcacagatctttttaatgttctttcccatgttgtattgcatttttgggggaagcaaattgactttaaagaaaaaagttgtggcaaaagatgctaagatgcgaaaatttcaccacactgagtcaaaaaggtgaaaaattatccatttcctatgcgttttactcctcagagaatgaaaaaaactgcatcccatcacccaaagttctgtgcaatagaaatttctacagatacaggtataggggctcaaggaggtatgtcggtcagtagtcaaaactatgaaatgatactggtttctccacaggaatatggttccattaggctgggagcaaaaacaatgttttttaagattgagaatacatacctgacaacgatccggaaactgctcctcaccactcccgtcatgcctgctgtcggcgtttgaccttccacgtgacagttcttcacaattcctttcatcattttttaaatattttttttactgcctatgggctgtgatgtatatagaagttgtacattaaacataccctcatttttttcttttcttttttttttttttttttagtacaaagttttagtttctttttcatgatgtggtaactacgaagtgatggtagatttaaataattttttatttttattttatatattttttcattagggccatatctccaaaaaaagaaagaaaaaatacaaaaaacaaaaacaaaaaaaaaagagggtaatgtacaagtttctgtatgtataaagtcatgctcgatttcaggagagcagctgatcacaatttgcttcatgaatcaaggtgtggaaatggttatatatggattgatttagaaaatggttaccagtacagtcaaaaaagagaaaatgaaaaaaatccaactaaaaggaagaaacacaacttcaaagatttttcagtgatgagaatccacatttgtatttcaagataatgtagtttaaaaaaaaaaaaaagaaaaaaacttgatgtaaattcctccttttcctctggcttaatgaatatcatttattcagtataaaatctttatatgttccacatgttaagaataaatgtacattaaatcttgttaagcactgtgatgggtgttcttgaatactgttctagtttccttaaagtggtttcctagtaatcaagttatttacaagaaataggggaatgcagcagtgtattcacattataaaaccctacatttggaagagacctttaggggttacctactttagagtggggagcaacagtttgattttctcaaattacttagctaattagtctttctttgaagcaattaactctaacgacattgaggtatgatcattttcagtatttatgggaggtggctgctgacccacttgaggtgagatctcagaagcttaactggcctgaaaatgtaacattctgccttttactaactccatcttagtttaatcaaagttcaatctattccttgtttcttctgtgtgcctcagagttattttgcatttagtttactccaccgtgtataatatttatactgtgcaatgttaaaaaagaatctgttatattgtatgtggtgtacatagtgcaaagtgatgatttctatttcagggcatattatggttctcatattccttcctacctggtgcacagtagctttttaatactagtcacttctaatttaaactttctcttcctgggtcattgactgttactgtgtaataatcgatttctttgaaactgctgcataattatgctgttagtggacctctacctcttctcttccctctcccaatcacagtatactcagaatccccagcccctcgcatacattgtgtcggttcacattactcacagtaatatatggaagagttagacaagaacatgcagttacagtcattgtgagacgtgactctccagtgtcacgaggaaaaaaatcatcttttctgcaaacagtctctcatctgtcaactcccacattactgagtcaaacagtcttcttacataacaatgcaaccaaatatatgttgaattaaagacccatttataattctgctttaaatacatctgcttgctaagaacagatttcagtgctccaagcttcaaatatggagatttgtaagagggaattcaatattattctaatttctctcttacagagtacaaataaaaggtgtatacaaactccgaacatatccagtattccaattcctttgtcaatcagaagagtaaaataattaacaaaagactgttgttatggtttgcattgtaaccgatacgcagagtctgaccgttgggcaacaagtttttctatcctgatgcgcaacacagtctctagagactaatccaggaagactttagcctcctttccatattctcacccccgaatcaagatttacagaagcccacgaagaatttacagcctgcttgagatcatcttgcctataaactgagttattgctttgtcctaaaaattagtcggtttttttttttctatgaggcttttcagaaatttacaggatgcccagactttacatgtgtaccaaaaaaaaaaaaaagataaaaaataaaggtgcaaagaaagtttagtattttggaatggtgctataaagttgaatctgttggtatttgagtggatttttttaatgtcacataagagatactgggcggcgtctgctcagcaatagctattcacagtgttttgttcgaggaagagaatgatatagaagcatgttttactgatgaaggtggcctgttcaaagactagttaagctgttttttcagagttataatgaagaatgatttttttaagggcatatgggcagtctcatacaatgtaagctattaactacctcctttatgaaaagaagccagcctttgccctgaagtccatccatttaaaactgttggaaatctttcatttcctatcaaaccacatgtacctgttcccatgtctgttcacctttgaggaagcaaagaaagtattataaatgagccacaaatggacagtgcaaacagtccctgttcttcttgctgagtgttggttcacttctttatttcgagggccgtggcccagctgcctgaagtcctgctcagcaccagcctagaagaacttggaagtaaacttcatggtcaggcaagattgttaaaaactctgatgaatacacttggtagcagcatttaatctgcgaacaggcaacattactcatgaatttaacagagatgtgttgagcacatgctatgtgcctggctctgttctaggctctgaggagtcctcaataaacaatgaccctgtttcaattatgttctagtcttccatgtcagacaattatagaaataaactagtcttccaaatacagtgttttacattgaaaacactcagaacgctccatgtttatgcactgaacactttttttatttttccaaagacagggtttagctctgtcacccaggctggagcacagtggcatgatcatagctcactgcagcctttaactcataggttcaagtgattctcccacctcagcttcccaagcagctgggtttacaggcatgtgccacgacgcccagctatttatttttaagaactttttgtagagatggggtcttgctatgttgccccagctggtctagatctcctggcctcaggccacctctgcttcccaaacctctgggattacagatatgagccaccatgcctggctgaaaacactcatttttgttaagaaataaaagtaagatactggctattgaggataagggggtgtgatgagatgagctctggactgaaaatcaaaaacacttaaaaggttaagtctcatctggggtgtggcctgtaggctcccaactgtgctctgcagttgtccaaggccctcccgtttaagagctgctcctgcagagcatacagttcctggcctgcccaggctcccgccagcacgctggtgagtcctgatgtggaaggaaaaagcagcagtggcttggtacccggtgctcccaggctccaccatcagcccttagaaatgcaggaactgactgcacctgtacaaaggccgtagtcaaggcctcctgaccccaagccccacgctgtcaggtgcatccacgtgcatctccaggcactgtgctagcgcttctacccttgctttctggtcctggtttggttttatgatgattccaagtcatgtcatcctctaaagtgccaaagtcaaattgctgagttaattcactttgggatttaaaatgatgaaaccctgagggaaagctggtggggctggaggtgggaggggcaaccgtcaagtgtgtcctaaacatgagactcatttgtcttcttcctgaatctgatttcagggacttaaagttttaccccagctttttccaaagtgtattctaagaaacagaagagatctccaaaaaatctccttatgtattctcttggcaatccatagtccatattgccatattaaagatagaaatcctgcagaagagacacctgttataatccaggcatttcctgacttaattaaccttggaattaaaaaaaaaaaaaaaaaaagcaattcctgaaaacatgctgcagagctttgggaaacaacttcatccaccagtgctcatgcctggccattgccccggactgaatgctccttgcattcttactcctgaaaccaaaattaagatgtcctcatgggaggagagaacatggaatcttctcttgctatctccacggccttgagccaggtacttaaattatttgaacctcagtttccttgtctgtaatatgggcatgacacccatctcaggggattggtaaggattaaatgagatgattaaaggccttgtcacatgtgaccggtgaatattaaccccaaacatccatccatccatacatatagacttctcctttggctggtgtcctaaaatgtgtttcacacaaagtccaagagaatagcttcccattttcataaccagtcacacagcttgtgtgactctttgttgctgtttttggtttatagtaaaacgtnnnnnnnnnnnnnnnnnnnnaataattgagaaagcaggacctgtgagttttccctacagcactcctcattcctgcccacgggctgcacacatacataccccaacaacttttttactttttcctgttattcactttggagatttctcaaacattacatattcatatcccaacaaagggctgtctttggggaaaaaagcccaaagcaaacaccagttttcaagcgactatttccaatggttcagtgtgaaaacagaaagaggaatatcacttcccactacagtttgctttcagcagttaaaaatattagtatgaaatttcatgcagtacccacatctttctaaatatctgcttcaatggactaagccgttgtactgtaaaacgtccctatgtccatctgacctctacatcccaccacccttacacccttgaatctgcctggtcttttaagggcttcagctggcggccactgccctccccagcccggcccaccctgcttgggttctgcaaaaccccccatgggttcggcctccagttcactcctcagatccccacatctttctgattgaggatcccattctgttgtacccatatttaaaattgcccgtcatctcaccaaggccagcttgattctgcataatttctctaccgaatgtcagttttgggtgtccaacaccctgcagtggtggaagatcgcacctttttcgcagacctgggggaagcaaatctctggactacagtcacacagtaaatttgctctgccctaccctgccctaacctaagaaagtgtcttgtaacaccttttaaaggtcagatgtggcaggtggccgaccacagtgtttaatttgatactccttttcatctgacacacagcagagagagcccctctaaagaaagagcactacggtcttcacgcgtagctggagatgggctgcagtgctgtgggctggagaagtgggattcacgatactcttcacttcctggtaggcttaaggtcaggtgaatcaatgaagcttgagccttgatctgcgtaagtttggtatttagctggcccgggatttgtatatttacaaactagattttcccccaagagttaaggaaccgaagcttggatgaagcttggatgcggctcctaaagatggtcttcaccaaacaaaagcgcttccttcaggcaagagccacagcatttgtcgagttgcctcctggtaagtggtgattacttcacatttggatgttttttgcacttgaaagaatttcatggctattagtggttcttcacagaagccttggtatggaacattatcacatccatcctccaaaaacagaagcagaggctgacgcccaaaataacatgccgagttagaaccaagccgagaccaagaatgtgtatgtacccaagatattttgcagctttacacaaaatctgggggagaccagggacttttaaaacagaagccgtgatgtacattggccacagttagagggagagaggggtctttcgttaattcttcattctagagatttaatgtcatatgctcagtttatgtctgtgcctatattaaaatgatactgtttcacccaaaatcgggatggtcctggcagcactctgtctttgcatagcaggctctgccaagggtctccttcctgctgtcatcctcgtaatcctccagagcttccctgcatgttttgaggaataaatgtcattatcatccctccctggtgtaagcagctcctgttacagggctcacacctgcaccacctctttgggcctcccttattctaatgcccaaggcttgtgtgaactcctatgagcaactcaagtttgagtccgtattcgacacacctactctcttgagtaaaattcctaaagcatgtcagacacattttctgctcaccacgatcttcaaatacaccacagaacttttattgaaattgtggtttcttcaaaaaatgatctgggcccatgggctttcataaatgatattttatgctggacatggtggctcatgcctataatcccaacatggtgggaggctgagacaggaggatcacttgaggccacaagttcatgaccagcctgagcaacatagtaagatgtctctccaaaaaaaataaaataaattaaccaggcatggtggcacacacctgtagtcccagctacttgggaggctgaggcaggagaattagttgtgcctaggagttcaaggctgcagtgagctatgattgcaccattgcactccagcctgtgcaacagagcaagaccctatctcagaaaaataataatgggcagggcgcagtggctcatgcctgtaatcccagcactttgggaggtcaaggtgggcagatcacttgaggtcaggagttcaagaccagcctgaccaacatggtaaaaccccttctgtattaaaaatacaaaaattagccaggtgtggtagcatgcacctataatcccagctactcatcaggctgaggcaggagactctggaacccaggaggcagaggttgcagtgagccaagatcgagccactgcactccagcctgggcaacagagcgagactctgtctaaagaaattttttttgaattaaaataaatgatgctttatgataaattagaattgtgctgctgtcagcattaaccaaaccctggccaccttaaagctgaaattcatagtcatccagggagtgggcctgtcccgcaggaattggtgtaacattccgctctgggtttagttaggtcttggaagcttcgctgacttggggctactattccacttaataaatggcctctagaacccctattggacaacgctcagggttctgattcaatattttcttccatgtttcagttttcattcatccattgagacttagaagaagacacttgaggaatgacaagtgacaaaggacatttggggaggacactagttgcttaggtttggctcatggctataaaaattcaggtctcataagacagcttatttgttcctatggggggaaagtgacgtggtatatcttacacatttaagatgaatacacttagcatgattttttaaaattacccataagtgcaatggttgttttgttggttcagtgtgtttttcaccaaatggtgtgaacatatggccagagcttctcttggccataagatctgaagggagaagagtccccatggcaaagagccatagtgatttatccagatgagtttcaattccaaaggggagcttagagtgaaggcctctcctagccaacttttcacacgcaatcccctctccccacatttaacattcaacttctgctgtgtgggtaataggagattggaatgcatctgggaaaacgaaaaatgggttttgttaatgagtggaagttcatcttggtgggccctgttttcaaatattaaatgtgatatattagtttgtgggcttggatttgatttgagcaatcaaatcttgataggaactggcatctcttcccacccacccagagtctgtctttagcagccgttgctgaatggtgagatctgtaagtgccatgaattgctttcagtctgatgcttgagaggcttgaacggggtattgaacttagatttttggagaacactccttaaagcctcttgcctggcttcctttatggcttttcagtagttgaaaagtgtattgttttttattttcaggatggtggggagctcctacctcttccccaaccctcatctccccccccagctcagcaaaggtactggggtgaggggtcattacccccagagcagccaaagggtgcaagacccagctctgtcttcttaggaggagtgggtctttgtcaaggggccctggttcagagcctgctcacctccacacctctgtctatgtcatccctgcagcatgacagtgggcaaagcatgagcacagtctagcatgtaatcagcattcagtaaaccatcgtgctttttcattctgaaagcaaataacaagcatcatcgtgtgactcgtggggccacacacgtcagcaggtaagacccatccatggtgatggcattgccgagatgtgcacagggtgctgtgggaggatccaggagagggggagcccaccccggctgggagggagcaacctgggaaggcttcctgcaggaagctgcctttggagacagagggctcatcatatgggagagagacagttggaagagatccctgggcattctggaatctcgaaacgtaagagttcagttgtgggttttgaaaggttctgagggaggagttggggcgggtgccccgcgtctctcctgagaagctggccttggcgagatgccgggcaattttaaatatgggtacaacagaatgggatcctcaatcagaaagatgcagggatctgaggagtgaactggagaccgaacccactgggggttttgcaaaacccaagcagggtgggccgggctggggagggcagtggccgccagctgaagcccttaaaagaccagacagattcaagggtgtgagggtggtgggatgtagaggtcaggtggacatagggacaaaagggaacggggggtcctggcgccggtcactgaaagtggtgctgctagtcacagagaggccagatccgaggaaggcctgggctgggcagccagcctcggggagggggtttgtctggcaggattagggcccggaggcgtccagaacctctgaaggcgctgagctggtggcagagggaagctgaggttgctcaccagcgggcctttgggaaagcagtggatcccctgctatccacgtgggcaaaaaagtaccccaagggtctttgggaagcggaagacagaggcggaagaggcggctcagagagacgacactgcacagcgagggccagagaggccacaggaaggttcatggccaagaaaccaggaaaggcaaggaaacaggctgtaccctagagccctggggggagtgcagctctgccccaccgtgatgctagcccgggaggcctgtgcctgacttgaagccaccagaactgtaagctcgtccacctgtgttgttttaagtcaccaaatttgtggtgatttgttgcagaagcaacaggacactgatagaggggctttttgagtctgtggtgcttataggatgtccgaggagaaccggtgagggagcggctgattgcaggggtctgggctcagcaggtggagagggttggtgtcatctccatagaggtggggagtgcggggtgagtggagacctgagggtgggagcagattgccagcaagagcgtggaaggggcgggctggaaagaggaggcaagaaggacaggacggagagggcgggtggggcactgggagaggccagggagcccatgttggcaccaagagccaaaggcttccaggagatgctgccacagggcccaggctgcaggacaggcccagatggcagcagagggttccctcgattctgcaatgggagctcatggaccatgcagatgacagggccagcgttgggtggagggggggctggctgtgcagatgacagggccagcgtcgggggttgctgcccttgcccaccttcagggcctgctatgaaaggctgctccatggacacgccctttgagatgcttctcaggacaggggctcaggatcccccgtgcccagctcactcctgctcgggaaagcctgccccaccagcgaccttgcctctcctcatgcatgaaaatcatcctactttgctcttcacaaaagtgtgggtggagaaaacggccttcaacactcctcagagcacctcctcggagcggaagctgcttcctggggtgtgtttctgttctggaggttgcaccttcgatcctgaggcgtgggagctggcctgaggttgaaggtgaggctgaggacctgggtgaggctccccaaggcccccggctgggctgagcaaagaacgggagcgtgcccccaccactcacagggtgtccacacctggagaaggaaaccacaggctttgtcacctttgtcttaagtcagtgggacaaacctagaaagtgaggcattttggacagctccaaggtggctgtgtcctggcctgcccagaccgagggccccgggattctggaggcgcagattggatcccaggatgcatgactagtgactcctaaggtgggaacccctgggtgagcgaggagtgggaggccggtgcacatccaccttctgtcccggcctcctcttccgccggtcctgtatttctctcgaagtctcatcccggccatcagagcctcaagacttctcaagctcctggcacattctgaggtaagcacctaggttgatggtggccttctctccacacacagcacagccacgctggggagtgggggccggtgaatggcctggggacaggccacaagcaggcctaggtgggggtgccctggcctgctgtcccctccacccctgtcctgggagcctgtctgcaccagcacagaaagaatatcacggctgtcacccacagggcctagcagccgggtttttctcaccaagagctcgtgtggagagggacgcaacatgtttcccttttatgaggctgctccctgtccccaaaggtggggctgacgggtgttcctgggaaatgagagcctgccctgccctttccccggggctccctcgtccatgctcagcctcccagaagcccctcctgctgagttgcccacagccctccctgccggcctggcctctccttgcagctcttcctcttctcatgaaggtgtgtggaggttggggtttgcgctctctcttccttgattaaccttgccagaggcttgtctgttgcagagaacccgctctcagtgtcattgataccactcgctctgagtcatgaatttctcagcttaccctttcttctccttccctctagtttagtttgttctttactatcctgcttcttaattacaacatttattttcatttctgttgaattttgtaaaacacattccagttatcagttttccccagggaacagtggctcacgtctgtaatctcagctctttgggaggctgaggcaggaggatcacttgagcccaggaattccagaacagcctgagcaatatagtgagacccccatcttcacaaataatttaaaacttagctgagcatggcggcgtgtgcctgtagttccagctgctcaggaggatgggacgggaggatcgcttaagcccaagcagtggaagctgcagtgagcagtgatggcaccgttgcactccaacctgggtgaccgagtgagaccctgtctcaaaaacaagacaaaaaaaataccagttttcttctcagaacattcctatgccatgactgttgttttataaaaacccacaatggctgtgttcttttcctctcctactcatgattttttttggaggctcttttagtttgaaataggttttatttttccctgtttttccttgtactattgaattttagttttattgcattattatcacaacatggcttatataatttctatatttgatcacttttcatctcttatttcttccatcattacttctctgctcacgcttgccttctggaatctccaggaatacccaacagatattttgcgttcttgcctttttcttgtcttgttatttatt

SEQ ID NO: 141 - DNA, 7744 bp, Homo sapiens
gatctgtctggctccattgatgacctccccacgggaacggaagcaactttgagctcagcagtcagtgcatccgggtccacgagcagccaaggggatcagagcaacccggcgcagtcgcctttctccccacatgcgtcccctcatctctccagcatcccggggggcccatctccctctcctgttggctctcctgtaggaagcaaccagtctcgatctggcccaatctctcctgcaagtatcccaggtagtcagatgcctccgcagccacccgggagccagtcagaatccagttcccatcccgccttgagccagtcaccaatgccacaggaaagaggttttatggcaggcacacaaagaaaccctcagatggctcagtatggacctcaacagacaggaccatccatgtcgcctcatccttctcctgggggccagatgcatgctggaatcagtagctttcagcagagtaactcaagtgggacttacggtccacagatgagccagtatggaccacaaggtaactactccagacccccagcgtatagtggggtgcccagtgcaagctacagcggcccagggcccggtatgggtatcagtgccaacaaccagatgcatggacaagggccaagccagccatgtggtgctgtgcccctgggacgaatgccatcagctgggatgcagaacagaccatttcctggaaatatgagcagcatgacccccagttctcctggcatgtctcagcagggagggccaggaatggggccgccaatgccaactgtgaaccgtaaggcacaggaggcagccgcagcagtgatgcaggctgctgcgaactcagcacaaagcaggcaaggcagtttccccggcatgaaccagagtggacttatggcttccagctctccctacagccagcccatgaacaacagctctagcctgatgaacacgcaggcgccgccctacagcatggcgcccgccatggtgaacagctcggcagcatctgtgggtcttgcagatatgatgtctcctggtgaatccaaactgcccctgcctctcaaagcagacggcaaagaagaaggcactccacagcccgagagcaagtcaaaggatagctacagctctcagggtatttctcagcccccaaccccaggcaacctgccagtcccttccccaatgtcccccagctctgctagcatctcctcatttcatggagatgaaagtgatagcattagcagcccaggctggccaaagactccatcaagccctaagtccagctcctccaccactactggggagaagatcacgaaggtgtacgagctggggaatgagccagagagaaagctctgggtcgaccgatacctcaccttcatggaagagagaggctctcctgtctcaagtctgcctgccgtgggcaagaagcccctggacctgttccgactctacgtctgcgtcaaagagatcgggggtttggcccaggttaataaaaacaagaagtggcgtgagctggcaaccaacctaaacgttggcacctcaagcagtgcagcgagctccctgaaaaagcagtatattcagtacctgtttgcctttgagtgcaagatcgaacgtggggaggagcccccgccggaagtcttcagcaccggggacaccaaaaagcagcccaagctccagccgccatctcctgctaactcgggatccttgcaaggcccacagaccccccagtcaactggcagcaattccatggcagaggttccaggtgacctgaagccacctaccccagcctccacccctcacggccagatgactccaatgcaaggtggaagaagcagtacaatcagtgtgcacgacccattctcagatgtgagtgattcatccttcccgaaacggaactccatgactccaaacgccccctaccagcagggcatgagcatgcccgatgtgatgggcaggatgccctatgagcccaacaaggacccctttgggggaatgagaaaagtgcctggaagcagcgagccctttatgacgcaaggacagatgcccaacagcagcatgcaggacatgtacaaccaaagtccctccggagcaatgtctaacctgggcatggggcagcgccagcagtttccctatggagccagttacgaccgaaggcatgaaccttatgggcagcagtatccaggccaaggccctccctcgggacagccgccgtatggagggcaccagcccggcctgtacccacagcagccgaattacaaacgccatatggacggcatgtacgggcccccagccaagcgccacgagggcgacatgtacaacatgcagtacagcagccagcagcaggagatgtacaaccagtatggaggctcctactcgggcccggaccgcaggcccatccagggccagtacccgtatccctacagcagggagaggatgcagggcccggggcagatccagacacacggaatcccgcctcagatgatgggcggcccgctgcagtcgtcctccagtgaggggcctcagcagaatatgtgggcagcacgcaatgatatgccttatccctaccagaacaggcagggccctggcggccctacacaggcgcccccttacccaggcatgaaccgcacagacgatatgatggtacccgatcagaggataaatcatgagagccagtggccttctcacgtcagccagcgtcagccttatatgtcgtcctcagcctccatgcagcccatcacacgcccaccacagccgtcctaccagacgccaccgtcactgccaaatcacatctccagggcgcccagcccagcgtccttccagcgctccctggagaaccgcatgtctccaagcaagtctccttttctgccgtctatgaagatgcagaaggtcatgcccacggtccccacatcccaggtcaccgggccaccaccccaaccacccccaatcagaagggagatcacctttcctcctggctcagtagaagcatcacaaccagtcttgaaacaaaggcgaaagattacctccaaagatatcgttactcctgaggcgtggcgtgtgatgatgtcccttaaatcaggtcttttggctgagagtacgtgggctttggacactattaatattcttctgtatgatgacagcactgttgctactttcaatctctcccagttgtctggatttctcgaacttttagtcgagtactttagaaaatgcctgattgacatttttggaattcttatggaatatgaagtgggagaccccagccaaaaagcacttgatcacaacgcagcaaggaaggatgacagccagtccttggcagacgattctgggaaagaggaggaagatgctgaatgtattgatgacgacgaggaagacgaggaggatgaggaggaagacagcgagaagacagaaagcgatgaaaagagcagcatcgctctgactgccccggacgccgctgcagacccaaaggagaagcccaagcaagccagtaagttcgacaagctgccaataaagatagtcaaaaagaacaacctgtttgttgttgaccgatctgacaagttggggcgtgtgcaggagttcaatagtggccttctgcactggcagctcggcgggggtgacaccaccgagcacattcagactcactttgagagcaagatggaaattcctcctcgcaggcgcccacctccccccttaagctccgcaggtagaaagaaagagcaagaaggcaaaggcgactctgaagagcagcaagagaaaagcatcatagcaaccatcgatgacgtcctctctgctcggccaggggcattgcctgaagacgcaaaccctgggccccagaccgaaagcagtaagtttccctttggtatccagcaagccaaaagtcaccggaacatcaagctgctggaggacgagcccaggagccgagacgagactcctctgtgtaccatcgcgcactggcaggactcgctggctaagcgatgcatctgtgtgtccaatattgtccgtagcttgtcattcgtgcctggcaatgatgccgaaatgtccaaacatccaggcctggtgctgatcctggggaagctgattcttcttcaccacgagcatccagagagaaagcgagcaccgcagacctatgagaaagaggaggatgaggacaagggggtggcctgcagcaaagatgagtggtggtgggactgcctcgaggtcttgagggataacacgttggtcacgttggccaacatttccgggcagctagacttgtctgcttacacggaaagcatctgcttgccaattttggatggcttgctgcactggatggtgtgcccgtctgcagaggcacaagatccctttccaactgtgggacccaactcggtcctgtcgcctcagagacttgtgctggagaccctctgtaaactcagtatccaggacaataatgtggacctgatcttggccactcctccatttagtcgtcaggagaaattctatgctacattagttaggtacgttggggatcgcaaaaacccagtctgtcgagaaatgtccatggcgcttttatcgaaccttgcccaaggggacgcactagcagcaagggccatagctgtgcagaaaggaagcattggaaacttgataagcttcctagaggatggggtcacgatggcccagtaccagcagagccagcacaacctcatgcacatgcagcccccgcccctggaaccacctagcgtagacatgatgtgcagggcggccaaggctttgctagccatggccagagtggacgaaaaccgctcggaattccttttgcacgagggccggttgctggatatctcgatatcagctgtcctgaactctctggttgcatctgtcatctgtgatgtactgtttcagattgggcagttatgacataagtgagaaggcaagcatgtgtgagtgaagattagagggtcacatataactggctgttttctgttcttgtttatccagcgtaggaagaaggaaaagaaaatctttgctcctctgccccattcactatttaccaattgggaattaaagaaataattaatttgaacagttatgaaattaatatttgctgtctgtgtgtataagtacatcctttggggttttttttttctcttttttttaaccaaagttgctgtctagtgcattcaaaggtcactttttgttcttcacagatctttttaatgttctttcccatgttgtattgcatttttgggggaagcaaattgactttaaagaaaaaagttgtggcaaaagatgctaagatgcgaaaatttcaccacactgagtcaaaaaggtgaaaaattatccatttcctatgcgttttactcctcagagaatgaaaaaaactgcatcccatcacccaaagttctgtgcaatagaaatttctacagatacaggtataggggctcaaggaggtatgtcggtcagtagtcaaaactatgaaatgatactggtttctccacaggaatatggttccattaggctgggagcaaaaacaatgttttttaagattgagaatacatacctgacaacgatccggaaactgctcctcaccactcccgtcatgcctgctgtcggcgtttgaccttccacgtgacagttcttcacaattcctttcatcattttttaaatattttttttactgcctatgggctgtgatgtatatagaagttgtacattaaacataccctcatttttttcttttcttttttttttttttttttagtacaaagttttagtttctttttcatgatgtggtaactacgaagtgatggtagatttaaataattttttatttttattttatatattttttcattagggccatatctccaaaaaaagaaagaaaaaatacaaaaaacaaaaacaaaaaaaaaagagggtaatgtacaagtttctgtatgtataaagtcatgctcgatttcaggagagcagctgatcacaatttgcttcatgaatcaaggtgtggaaatggttatatatggattgatttagaaaatggttaccagtacagtcaaaaaagagaaaatgaaaaaaatccaactaaaaggaagaaacacaacttcaaagatttttcagtgatgagaatccacatttgtatttcaagataatgtagtttaaaaaaaaaaaaaagaaaaaaacttgatgtaaattcctccttttcctctggcttaatgaatatcatttattcagtataaaatctttatatgttccacatgttaagaataaatgtacattaaatcttgttaagcactgtgatgggtgttcttgaatactgttctagtttccttaaagtggtttcctagtaatcaagttatttacaagaaataggggaatgcagcagtgtattcacattataaaaccctacatttggaagagacctttaggggttacctactttagagtggggagcaacagtttgattttctcaaattacttagctaattagtctttctttgaagcaattaactctaacgacattgaggtatgatcattttcagtatttatgggaggtggctgctgacccacttgaggtgagatctcagaagcttaactggcctgaaaatgtaacattctgccttttactaactccatcttagtttaatcaaagttcaatctattccttgtttcttctgtgtgcctcagagttattttgcatttagtttactccaccgtgtataatatttatactgtgcaatgttaaaaaagaatctgttatattgtatgtggtgtacatagtgcaaagtgatgatttctatttcagggcatattatggttctcatattccttcctacctggtgcacagtagctttttaatactagtcacttctaatttaaactttctcttcctgggtcattgactgttactgtgtaataatcgatttctttgaaactgctgcataattatgctgttagtggacctctacctcttctcttccctctcccaatcacagtatactcagaatccccagcccctcgcatacattgtgtcggttcacattactcacagtaatatatggaagagttagacaagaacatgcagttacagtcattgtgagacgtgactctccagtgtcacgaggaaaaaaatcatcttttctgcaaacagtctctcatctgtcaactcccacattactgagtcaaacagtcttcttacataacaatgcaaccaaatatatgttgaattaaagacccatttataattctgctttaaatacatctgcttgctaagaacagatttcagtgctccaagcttcaaatatggagatttgtaagagggaattcaatattattctaatttctctcttacagagtacaaataaaaggtgtatacaaactccgaacatatccagtattccaattcctttgtcaatcagaagagtaaaataattaacaaaagactgttgttatggtttgcattgtaaccgatacgcagagtctgaccgttgggcaacaagtttttctatcctgatgcgcaacacagtctctagagactaatccaggaagactttagcctcctttccatattctcacccccgaatcaagatttacagaagcccacgaagaatttacagcctgcttgagatcatcttgcctataaactgagttattgctttgtcctaaaaattagtcggtttttttttttctatgaggcttttcagaaatttacaggatgcccagactttacatgtgtaccaaaaaaaaaaaaaagataaaaaataaaggtgcaaagaaagtttagtattttggaatg

SEQ ID NO: 142 - protein, 1531 aa, Homo sapiens
MPPQPPGSQSESSSHPALSQSPMPQERGFMAGTQRNPQMAQYGPQQTGPSMSPHPSPGGQMHAGISSFQQSNSSGTYGPQMSQYGPQGNYSRPPAYSGVPSASYSGPGPGMGISANNQMHGQGPSQPCGAVPLGRMPSAGMQNRPFPGNMSSMTPSSPGMSQQGGPGMGPPMPTVNRKAQEAAAAVMQAAANSAQSRQGSFPGMNQSGLMASSSPYSQPMNNSSSLMNTQAPPYSMAPAMVNSSAASVGLADMMSPGESKLPLPLKADGKEEGTPQPESKSKDSYSSQGISQPPTPGNLPVPSPMSPSSASISSFHGDESDSISSPGWPKTPSSPKSSSSTTTGEKITKVYELGNEPERKLWVDRYLTFMEERGSPVSSLPAVGKKPLDLFRLYVCVKEIGGLAQVNKNKKWRELATNLNVGTSSSAASSLKKQYIQYLFAFECKIERGEEPPPEVFSTGDTKKQPKLQPPSPANSGSLQGPQTPQSTGSNSMAEVPGDLKPPTPASTPHGQMTPMQGGRSSTISVHDPFSDVSDSSFPKRNSMTPNAPYQQGMSMPDVMGRMPYEPNKDPFGGMRKVPGSSEPFMTQGQMPNSSMQDMYNQSPSGAMSNLGMGQRQQFPYGASYDRRHEPYGQQYPGQGPPSGQPPYGGHQPGPQQPNYKRHMDGMYGPPAKRHEGDMYNMQYSSQQQEMYNQYGGSYSGPDRRPIQGQYPYPYSRERMQGPGQIQTHGIPPQMMGGPLQSSSSEGPQQNMWAARNDMPYPYQNRQGPGGPTQAPPYPGMNRTDDMMVPDQRINHESQWPSHVSQRQPYMSSSASMQPIWPQPSYQTPPSLPNHRAPSPASFQRSLENRMSPSKSPFLPSMKMQKVMPTVPTSQVTGPPPQPPPIRREITFPPGSVEASQPVLKQRRKITSKDIVTPEAWRVMMSLKSGLLAESTWALDTINILLYDDSTVATFNLSQLSGFLELLVEYFRKCLIDIFGILMEYEVGDPSQKALDHNAARKDDSQSLADDSGKEEEDAECIDDDEEDEEDEEEDSEKTESDEKSSIALTAPDAAADPKEKPKQASKFDKLPIKIVKKNNLFVVDRSDKLGRVQEFNSGLLHWQLGGGDTTEHIQTHFESKMEIPPRRRPPPPLSSAGRKKEQEGKGDSEEQQEKSIIATIDDVLSARPGALPEDANPGPQTESSKFPFGIQQAKSHRNIKLLEDEPRSRDETPLCTIAHWQDSLAKRCICVSNIVRSLSFVPGNDAEMSKHPGLVLILGKLILLHHEHPERKRAPQTYEKEEDEDKGVACSKDEWWWDCLEVLRDNTLVTLANISGQLDLSAYTESICLPILDGLLHWMVCPSAEAQDPFPTVGPNSVLSPQRLVLETLCKLSIQDNNVDLILATPPFSRQEKFYATLVRYVGDRKNPVCREMSMALLSNLAQGDAARAIAVQKGSIGNLISFLEDGVTMAQYQQSQHNLMHMQPPPLEPPSVDMMCRAAKALLAMARVDENRSEFLLHEGRLLDISISAVLNSLVASVICDVLFQIGQL

SEQ ID NO: 143 - DNA, 176771 bp, Homo sapiens
  misc_feature (1)...(176771): n = A,T,C or G
aatgttctgagtgtggtagacaatataacagaaattgaagacagggactttgtccttgagaaattgatccatccagctagggagatgaaaattaccttaataaagtacagttatcaaacacttctggtgtgccaggtgctgtgctcagagctttgaagaccttatttcactgaatcctcagaaacctggggaagtaagcactactgcgatctgtgtgttatacaggagtaaaccaaggtttgggatgtttacaaactcttcaaagggttgttgtgaggattatgtgagaaaccataatgcattatatcagttgggtttacatgtgattttctacaaaaaaaaaaaaaaaaagaaagaaaaagggggaaaaaagaccaaaacaaagcaaaaaataccagaagcttaaacaagacagaagtttattcttatttctcatacacgaagtcaggaggtagacagcagctgagctgccctgagcagctccgcttgagcgtgtggacgtactgacttccaagggaatatgcaaaatgtcgatttttttaaacaggtggtcatgtgcccagctaaacactggggcttctgtaactaaaggtgggaagaacagatattgggttagttaggcaacttgcttctctgccgtatgtatgcaaagtgccagacacgggataaacatactaagtggtatgtaataacagttacaaagctcaatgcagcctagaggtggtttggttcattgattaaatacaactctttgtgtctgaggttttctcttttttacgcttgtgcactatccctaaacaggtaagtgaatgagaacaagggagggtgtaccgcaggccgggggcatccccatccccgcttgggccagcttctcctttaccttttccagagattcgaggtggtttgccctaaggtttcacacctgtgtgaaggtggcaggaagcagccaagtcatgatgcaaagcaaggacgctgcccaggcctgggcatttcagcttctgcttgcctctcctgctccctctcagcacctgtgaatgacagctcaggtctctggcaaatgggaaaaacccaggacatgccagtcacattggacaagacatcctctgtatcagtgacaacaagcaagacgcccctcatgctgtgcaagcaggtggccctgagaaagggttggttgtaactcatggttaggtgtcttgaatttggtccatttattttgaaaggttttccatggatcatctcaatctcacaaattcctagataacagagaagatgctcaggctacagaatgttcccactgtgtggagttgaggagttgtcctccgcctcttaaaccttgaagcttgctttttcttttgagacaagttctcactctgaggcccaggctggagtgcagtggtctgatcacagctcactgcagcctcgacttcctaggctcaggtgattctcccagctcagcctcccaagtagctaggactacaggcacatgtgactgtacctagctaatttttttttttttttatagagatgagatttcaccatgttggccaggctggtctcgaactcctgggctcaagctattcgcctgccttggcctcccaaagttctgggattataggcatgagccaccatgcccagcctgaagctttctttagagctaagtttctatggtgagcagggttggcttatcagagcagggctgggagagcaagctgggtaggactgatgggtagtgtggaatggtctggacggcagggataaaagctggaatctccagttgcttcatgccaatatggtttgggcaggaaagggtggagaggaaaaagaggaaagagaaggcctcggccctgccatcctctcacctccttatctaatctacgacctcattcttcagtgttacctcctcactgtctctctcatggaggccactgctagcatacatggagctttgtgtaagttagaaaaagacaccccattctccagtggactcagctctgtgccaggactcaatgagtagcatgcaaggccctggctgaatcagagcccccacccacctccttggccttgagcagtgagcaatctgcacattctgaagtagtggactctgtggggtcagttcacttatctctatccccatagtccctctggtccccatacaactccaccatctctcttttctcacttgggctatgcgcaatcatcacagataattaggagagccatttataaagaggcctacatttagacgcggtgttgttgccaggtacagttatacatttagtcctagagataacaacaactagattaaaagatgttcttcatgttttttgctttttaggttgggatctatgatcagctcacactgccctatgaattaaaaaataaataaatcttaagatttattctgcaaaaggcatatttgtatagcattgtattcttgagtctgtacattaggaatttaaaaatgtaaacattaaaataaacatttgtatgctcctcttttatggttttaaaaaatatcataatatcctcagagccgcaataaatgagagtggccaggccgccctggtcccagaggtttgagccccgactcccgggacctgccgcccgattccagctctggccgcactgccaacatgctgtcttcctagcagtggtttcttgctataacccagatctgatgtcagccccctgcttcaatgccctggttacttcccactgcttttgggtcacaagccctgatttaattgggcctgggacaagcatggtggtccctgtctcccagcatgcctgccctcaccctgctctccagtcccacttgcctcctgccgtctgcggcactctttcccttctttatttaatgttttctcctctttctttagtgttcagcccaagtcacatttcctcagggaagctgtccctcagcccccagtctgcatcaggctccttggctatttccctcatagaaccctgtacctttccttcagaacccattgctttgtaactctccattagtgatcattcaatgaatgatccggtacattcaatgtggtcaagtgttattagtttttgttgttcactccagtgcccacagcacctagcacagggctagggcagagtaggtgatagacagttccttgtcaaatgaataattggggttgaggcaaggagtccccttcccagatgctccttgtgggttatgctttggcagggaaaccttttggcatgtccggtccttgagaaagagggtcacctatactacacagagtacagcttgacacaggtgtcacctgagggcccaagaagatgccagggagagctcactgaaatttaagtcttagagttacatgttgcaatgtaacttcaagttagagagagaaaaaaattctttatatttaacttgggcatttttaggggaatgggttaataagcagattcctcaatgaaattatgtcattttggtatgaaaagcatataaccaagtcctttggccctgaccaagacaattagatgactgtcataaacccttaaaggtgctcactgactcgcataatgaattagaaaccaagtcatcaggtataagcaaggtgaactaaaaacgaggaatgcgctccattaatgcacgagttattgttatttgggacttactgtttttgaaacatagtcttattctcaaagtttacctgtactataaagcaattaatcattatctgtgagagacctagaaggccttcaggtaagttcctgaaacttttctagaaaactgaggtgattcaactgccaagtgacttatttgtatacctgattatatatgcttactacccaaatatttattttgaggaactagagtggagttacctatgcaggacctttagccagccaggcagcatgttatcactaagaacggccacaaagatgactacatgatgtgatgtagaatactgaaaaacactggtaggtgctcagtaagtgattttcactaatggcaaaatgattgaggacagtactggaaataaaagcagccattgaacacacatttgtctaaaagttacaagaaatttataaatgaggctgtgataaagtcattcaaaagcggacagtccaggataaaataaaaagtacaatgtattaaaatgtagtaaggtgtttcttaatgtatttcactggtgttactatgtttctaaggaatttggagagaaactgtagtagcctgatgttaaacttaaggttctggaagtccagactccacagtggtgggttccaggtgtcaagtcggagttgtgtcagcgggaggattagggtcagctgcccgctaatggcagccagcaagcctccgctgcaggaaatgctgcgggatggggaaggtctgagcttgcttctttactggccaaatcccatgtgacattgaggggcagaccttagtaggtatgagtgattgttaattgtttatctcccctatgaaggacaggaccaaggtaattatctttcattttcaaggcatggcacaaggtagactctaggtaaatttgttgaatgactacatgcagtgtatctccatccaggtttattatccccacaataattttcttagtaagtttattagtgctaccgtctgccatagttcccaaatttgaactattttttttgcctaggcttctttttttttttcaaatcctacctaattgatttgcacagttgtttcaaatcaaatgctacatcccatatcttgcagtgacgcagttattcactgctaacgtctaaatcggagaagtgaaaaggacaattgtttcgtgctttcttaagtccctgaccaagatcagtagggaaatcccattagctctattcatcgcatttctcataaatctaaaaggaaagcaagtatccaaagctttattctttaatagttcttatttgtaaaaccttgacagggctttattctaaattgcttccaaattacataaagaatagttagaaatatgatgggcagtgaatcgtgatagtttcagtcatcgaataaataagtagaacagtaaaaggggactaatctgaaagcaaacagagtatgatgggctacgatgaggcaaaaagaacagaactgtggaattcttaaactaccatctggctcaatcccctttaagtggccaagttgaagagccttttattcagtgccctaaaacttattcaaaaggcgcagtatttgaatattaatatttccatacagtaaaaaaaaaagtcttttgtaaccaaaaaggaatgtttaacaaaataatgggtaatcctctggctaaacatgagggcgtggggagcaccctgtgggtgggaggtcggctggaacccagggtggctgcgggcagcctccgggccttcccctcatggcttctttgtggttagggtaacttattaaagttgtcattgtggtttgaaatttaggcaagaggtgtaaaattaaggaattcattaggaaaaatgagcgcagtgatttctagtaccttatttcatcaaaaagaaacaataaggtagaattgccatatgagatagttgaggcaaggaacacaatggaaatttgaacctgtggttgaaattgtgcttttgtgtaatgggaacctatttcatcactttgtaacagacccctgacaattggtgttttgtttgttaagccctggatgtttaaatgaaactaaacaggcttttattttgttttcctgaggtgtgtatgaaaagttgagcaaattcgagtgcacttcttatcttcagcaaagatgctttagaaaggtattttagcattctccgtggtttaaaagacaaaaccaagtcctgccggctttgtgttgtgcttctcctacaggctgcagtgccttctgtctgctttagggtgtggcatctgccattggggaggaaaaactggcatgtgtcgccttttatagcagactgatttcattgtgctgggggcctctattttatagtctcttagttccaatcttctagttgacttgctgaagcaaatggaattaaaagagattttgacttctctactaatttttttttagtttcacgatttgccaatatgaaaaaatattttaaggaaaagggccatagctgaacttggtgactcattttcccttttaggattagttgtgaaaataagccacaacatatggctacacttgtatgaactgactttgatatattttatcaatttgaaaaaatgcacttttaggatgatgtgtacatacttagtttgactatgtctaaaagcataaatatgtaattgattttagaatatatgtatatacacacaaaacagacatatatttatatttgcatatgaaaaactaaaaattcaacttctgtggtgtaatgcgtataattagtatgtatttgaatatataaagggagaaaatccaggaaaaaatgtcaaaaaggcacactaacaaagatgtagtattctcttggcaaaaactgatgaatgatttggcacgaattcatcttatggttctgttattctctctaacacacgatgatatatcccgttttccagttgtttgcgtagaattgcaatttgttgtttctacactctataatgacccttgggtgtgcacctgattccctccccccgaccccaattagtcaccagttttcccatcaatccttttctatttagtcatgtaacatatttacacttggtcaaacaaataaccactgctgcagtggaaatgaactaaaatagtttttatggaaagctgaagaatgaaataattttggaaaactatactctaccaaaaccgtaagtattgtttctgccaggttttaaatgctttctctcaatgaaaactgagtccacactagtacaagtgggtcattgcctaaggttaagaagtcttgctttttaaaatgttactaggggacaatgcacatattgaaaacattaataacaatgcaaatattaaaaacattataaaatgttaatagacaccaatttttaagagaacaaagtatggaacatttctacattaggactagagttgactgttttatattattattgaagttatatttattaaatataatgtctataatattttagtttcgttccacatctctttgaaatgaatgtatatcgagagggttaactgtgcacacgaagctctgaaacatgatgaaaggtgtcatatagatttatgaagatacgagctaacccatagctgtcgctgttctggcaccaagagttaaatgttcatgtgaaagttggcgcagaaaacaccactgtacatactccacagaggacatccaagtgcatgtaagaaaaatgctcctttgggaatacgtggacatattcctttggaaatacactgacaaacctacatacgtgtttaaggtgccttcaaaaagagttatgtaaacattctctttggggcgggtgcagtcagtcataagcatttattgagtacctactgggtacaggccatagggctctctgaccggggctaaccttcatttcaaatctttcctaattttgcagttggaagaagttgtgggaattacgccgatggcccgaaatcaaggcagaggcgaacgttctgaaaattacataactcctgggagagaccgtgcttttgcagattgcctaaatattttctttctccgtcggctccttgtaacctctgaggccaatagacaactttgtttcccagcccttctccctcttttgtctgctcgtcagactcgttttccacctttgtatcgttccttttagacgtgaaaacaaacatgcgaacgcccggttggcaaggagacagcggcccggggggaaagtgcaggttccggccgccccacgccgccgcgctccgagcggccgccgagccgccccggccccggccccggccccagccttagcccaagcccggctgggtcccgcgaggctgcgccggggcgggcggcggcggcccggggacgagtccagtccgcgttttgcgagtgcgcgggagtaatgcgagcgaagtggataatagttgctcgagctcgcccgctgcctctcaagccatgctgggcccgataggctcagctagtcgtgtatttacccatatccgggctagagaggaaaagagaaaagtttcatttaaacctgaactaaaaactttcaccatgaaagcacacagcaggagcaggcccagagcgtaaggcgtgcccggcccggcgctccggcggggcctgcggagggggagggggtcgcggcttcccggcgggccgcgtggatgcgcacaggaggggccgcggcctgaaaagtgggggttattgtctccccccgccccccgcccggcctcgccacgccgcggcgatcatggccgcgcgggcagcagcggcggcggcggcggcggcggcgcgggcgcgggcgcgggcaggcagcggcgaacggcgggcgccccccgggccgcggccggcgcccggagcccgggacctggaggcgggggcgcgcggcgcggcggcggcggcggcggcaccgggacccatgctggggggcggcggcgacggcggcggcggcctgaacagtgtgcaccaccaccccctgctcccccgtcacgaactcaacatggcccataacgcgggcgccgcggccgccgccggcacccacagcgccaagagcggcggctccgaggcggctctcaaggagggtggaagcgccgccgcgctgtcctcctcctcctcctcctccgcggcggcagcggcggcatcctcttcctcctcgtcgggcccgggctcggccatggagacggggctgctccccaaccacaaactgaaaaccgttggcgaagcccccgccgcgccgccccaccagcagcaccaccaccaccaccatgcccaccaccaccaccaccatgcccaccacctccaccaccaccacgcactacagcagcagctaaaccagttccagcagcagcagcagcagcagcaacagcagcagcagcagcagcagcaacagcaacatcccatttccaacaacaacagcttgggcggcgcgggcggcggcgcgcctcagcccggccccgacatggagcagccgcaacatggaggcgccaaggacagtgctgcgggcggccaggccgaccccccgggcccgccgctgctgagcaagccgggcgacgaggacgacgcgccgcccaagatgggggagccggcgggcggccgctacgagcacccgggcttgggcgccctgggcacgcagcagccgccggtcgccgtgcccgggggcggcggcggcccggcggccgtcccggagtttaataattactatggcagcgctgcccctgcgagcggcggccccggcggccgcgctgggccttgctttgatcaacatggcggacaacaaagccccgggatggggatgatgcactccgcctccgccgccgccgccggggcccccggcagcatggaccccctgcagaactcccacgaagggtaccccaacagccagtgcaaccattatccgggctacagccggcccggcgcgggcggcggcggcggcggcggcggcggaggaggaggaggcagcggaggaggaggaggaggaggaggagcaggagcaggaggagcaggagcgggagctgtggcggcggcggccgcggcggcggcggcagcagcaggaggcggcggcggcggcggctatgggggctcgtccgcggggtacggggtgctgagctccccccggcagcagggcggcggcatgatgatgggccccgggggcggcggggccgcgagcctcagcaaggcggccgccggctcggcggcggggggcttccagcgcttcgccggccagaaccagcacccgtcgggggccaccccgaccctcaatcagctgctcacctcgcccagccccatgatgcggagctacggcggcagctaccccgagtacagcagccccagcgcgccgccgccgccgccgtcgcagccccagtcccaggcggcggcggcgggggcggcggcgggcggccagcaggcggccgcgggcatgggcttgggcaaggacatgggcgcccagtacgccgctgccagcccggcctgggcggccgcgcaacaaaggagtcacccggcgatgagccccggcacccccggaccgaccatgggcagatcccaggtaaccctcgcgccagccgggcctgcttccgcccggcggcctcgccgcgccgcgagcctgagtttctttctttgccgcgtacttttccccgtcttccaccgcgggggcggnnnnnnnnnnnnnnnnnnnncttttccccgtcttcccgcgggggcggcgggggcgcggcgcccaaagccatcttgacgggcggccgcctcccgcccgcggtcggggcgccccgggggccggcgcgctgtccaggcctgggagggcttcgccgggccgggccgggccgggtggcttctaccccgccggcccgcacccgcgtcccccccctcccccaggcccgggaacgcgaagcgagatcccgaggcgccacccgcgcggtcgccgtttggggcggcggggaccgttcgggtgcttttgtaacaaataggctctcccggccaggacggctggggcgaagagccacccgatcggttctgggagcgcccacaatgtgctttaacgggggaaagaatgaggaactttctcccacctttagccacagcacgttccctcttggcttccgaggtccaggcagggaaaataggttagctttgtgacaagcgagtgggtttttcctacttagggagagccattcagagacactcggtgcgggcttcgagctcgaacgtttgctggtaggaataataacaaaatttacaacgacatggaggtgcaatattgtaaaatacatcgattcgttccttagaatagccagggaaatccattattgggcttacgggctgcttgcagggagtcaccttcaacaggcaggctatgtgaaaggagcacgttccggatcaattgaacttattttgatcatggattaggcatgcattttattcagcaaatccagtaagatagcagaccagtgaaaattgatcttttgggatcgtatttatttggattttctttattttgctgtcacccgagtcctacagcgctgttaggaagtgtcctgcactcttgctgtttcttgctagtaggctgagcctaaagactgacttgatctcctttgcaaggtttggaatttgaattgtggaggtaaactggctgtaatagtctccagacagctgcctctgagttgacatctaatctgccatctgattggctcccctctcaccattgggcatttagcactgctgatgtaaatagaagtgctgagcagtacagtcacaaaaattcttgccacaaataataactgagctctattacaagcaaatgtaaggttcagtatttaaagctgaaactattatgaatcatagttattaataagaggatcaaatacagaaaaacagttcgctggtgtccagtattgggcatttacaaaattcagatctttgatgatagtcttagaatatgcacattacatatatcatagactttaattggaggctgaggataaggccattgaaaaataagtaaaccacgaattttaccaatttttggatttgtaaagcctttataaaagtcttccctttacaaattcaactatggaaaaatttgaattctgtcagcacacgcagcttaataaaaccttaaaatttttttaagattttgataggcagcaatatattttggtgatgtgtaattcacctgataaacaagatttaagcttcatttttttgtgatttatcagttctgactgttcaaagatatttgtggatgaggagttttggttagaattgacatatttaaaaaacgaaatgaggaaaccacatatttgtgcagataacaataattaaaaggggaaaaatgagatattcctgtgaaatactaagaatcatttcatatttgcttttgatgtggagaatacagaaatgccccataatcttttttttttcttcattgttttgttagattaggtaatttgagccttgtttgaactgcttacacgatgaattagggaaactatattctaagcaagttgtgctgggtgtctttttttccaaataatttttctttcatgttaatgctatgaaagtttaaaaaatcctaatctgttagagaggaacaacagtcgttgtatgtatatttttatgtaactcatttattttaggaagaggtattttaacaataatcataccttagagacttgtcagagtgaaggaagggctgaatttaacaaataatcttgtgaatcctaggctgaacactgctgtccactgctttcagatctttagttattggagttttgcttttaaggataatagatttttctattcttaatagaaaacttgtgatttcaacttgtttttgattcacacgaggaaaaacattatagagaagaatcatggaaataaacccacgtaattaattttaaaaaggtttgctttgtcagcctgcttttaaaggagcagtttaaaattcacatcttcgtaaactagagacgaatgaagttagaggcagatgtaggaccatgttactttagagtatttttttcttaatggtaccaatcattttcagtattttgttttcttgtaatgagaatgaatccattatgtccctatgacccttgggaataggctttttttttttttttttttttttttttttgttgaggttgggggaaatatggacatgcgacctagattcaggaatttcttttaagtaccttaccgtgtaacatgtggaatgtgtcttttttacaatccttttttttcttttctttttggaagttagtattatttagtattagttgttgtaattatactaagaaacagtcatttgtccaaaatattaaattactgcctgactgtaggtcatgaaatgctattaaatcacattgttaaatgatgaaatattttggcttttaatatgtttttagtttcatttttgatttcaggaaatagtttctattgggtggcaaatgttttcgtaattgggacaaaacgtgtatatattataggagaagggtctttttaaaaagtgaaataagccatttgacgattcagtttattactagatttttgtaagatgagtattcagatggagcagtctcaaaaggaatattgaggtctactcacgcacataggttttatgatgtccacatttctactgaattccataaatgcagttttaacttttagttttataaaacgtagtacaatgtattaagaaaagggccttatttaccattagaagaaaagtgattagctagcatgcgaagcaggaagctacaaactggttcctgattaccttaaaatgtgtgtgagatacattatttgataaaatcactcccagttaaattttagggtgtctgatattttaaatcttgtaaacaaatttttgtggcctaaatttatatatttgccaaagtatggatggctgtgtatagttagaaaaggtggacttagtaactgtggctaatggaaagggcctatcatttaaaaaacaggaaaagaaaatataacaaatgtctgcagttttgttttctgaatcatctgggatgaaattatgcatggcttaaaatcgttttcattgggagtcctgatttttgtggtacatacttttgacaatattttggtagttttttttttttagtggtagccactctttaagacagctatcacttaggtttatgtttatattaatactacatcagtaagtatatgctagggactagcacatccttaccttgaatctataatgaggaaccttaacccctctttgctttggctctgcttgtctatatttagtcatgaatttttggcaaggctttttatacttgttccatttttctcaatgtcatagtgtatcagaagtgtgttatggatgtggaaataatgcagatcacacttggacacttttactaatatacttaacctctgaatgtcattttcctttactgaaattgaagaaaataacgtctttattctgatatttaaaaaaaaaaaacattaattctgatttgagaactgattttaaaaatgtaagacaatgtagaggaagacttaatataagctcatttgatcgttttattagacacagataccttttaaagagaataggtgtaatagaatgcggttgagttttcagttctattttttattaatagactttatttctttatgattctgggcagggtgtatctatctaaaaagatgacttctgatgtaataggaacacttgctttcctaggataaattccaatatcacaggcaaaccgaaaagatgatcatttcatttatttaaccctaccctttcctaggagatgagtgatttgatgaacatttgttagggttccatgaaattttctactccgtttggagactcactggggatgtaaattttggatgtgctggcctaggactctgtattcgcttttttgccggtgtcctcaatctggaggcttttcttgcagctctacactggactgacactgctcagctcatggggttgtgtgctttgatccatgtgggtggaaaagggactgatatttcactcgtgtcacttttgttttggagtgtatgtgtagatttgtaaatttgagattgatatttatgtttgatagaagtgtggtgtgttgcataaaatgacagatttatggaggctgaaaatattaataaaacttaattccattttttttttgcaatatttaggttttccagttggatgttataaaatttttatgacattttacactgctgttattactcaaggggccgtatccacctcttaggcctttttgggattgggtggttttggttgcatgccttttcggaggtgccctttcctgaatgggagggaggtttttgcaggttctctgtggatatgtaaagtagtgccgcacgcttgctgtgtgtgcttgcttgaggctgaggaatcccaaaccctgttccctgtcgtgtccgggagaggcaccaggcaaaactgttcctctaccaagaatatatttctgtatcatagatgtagaactattataaatatcttttctctagcttggaggctatttgaatgagactcaatggcccttttggtttaattgggtaattgagtgaattaattctgatctaaaaacttggtgtactttagcaactttttcttcaggaaatttggtaaagataaaatgacttaggtatcagtcattacctgagtgtcctaagtattcatttgtttttccttatactgacatctgaatgaatggaatgatagacatatactatatagttttaattagcaattcactttgagtgagtgaattttttcagagtagaatatgtgtttccactgtaagttttcactaaatatgttctattttcaaaatctttgacttggagtaattctaagaaaattctttccttacatttagttatttgtttttctttttgagacagggtctcactttgccacccaggttggagtgcagtggcgcgatcttggctcactgtggccttgacctcccagattcaagtgattctcctgcctcagccccgcaagcagctgggactacaggtgcacgccatcacacctggctaatttttgtatttttcgtagagatggggtttcgccatgttgcccaggctggtctcgaactcctgacctcaagtgatccaccctcctcggcctcccaaagtgctgggattacagatgtgaaccatcctgccaggcaagatttacttacttaaataggatccagtaggcagttttcaaacccacatctgtatggatcaatgccaagaatattagaaggctactgagtttgacagatgaactaatgatgaaattaacttgtttcttggatgagatttattaccaggcaccagactaaagccctaaaatcttaagcctatctggtttatgaatagctactcttatttccattattaaaatcaggtagatggcagcagaatctggaggagattcaccctctgttgaccatcttctgtaaggtgcacttctcagtgtcttcctgggccttgatgaatgatgagctggagaactagaccagaagccattccttatcaggtgactctggaagggaagccatatttgatgaaatccagaagaaatcctggaccataatgctacattttttctttttttgtaatgggatgctaaaaaattaaatatatggttttttttttaaatagaggtaagctatacgtacataacatacaacttaccatttgaaccatttttaggcatacattccagtggcattaagtacattgtcattgttgtgtggctgtcaccatcatcatctatccccagaacttttccttctcaaactgaaataaaaatatttttctctttcttttaaaattgttagctgctaatgtgtattgtaagtaaaataatcttgtttttgtaaccattaatcttatcacttcatagtttgtgagtaaattcttccgcagacattccatcaggatgctaatggtttttttgtttgtttgtttttgttttttattagtacattacttcctctcaattctaactttggggtaatcctcatagagtttgaggatctctttggagatgtgtattacaaaggttagtagtttcactgccagttatgttattaaaattttgaaaagcagctttttggaacctttctaaagtttaaaggttgagggtatttgttgagagaaacctgggacttggttagataatagggtgtggaaatgaactgttaccattctcacttttcccttgcttttcttccctcaccttttgcatttgtagtctcttaaaaattattaattttattttcccactattagtgaaaatcatttatagtgatatttttttctattctttctgtgtttgaagtttctgggcatctcacccctaccaacccagagcaaacccagagtctaggtggtgccatgtccttttccatagtgttctctgccaccaaatttgtgcctccccctcatgtttttactttttagtcctctgcaaaacttcagaaattctttgtatgtggaaaaattactaaattaagatgattgaccttttagaattacattttaaaggcagctgtgaagggagacttctagatcctgcctagtctcatgaacaggcgtctttggtttgtgtaaggtattggaattgtactggaattgctgctgatgctgataggtagtcacatctttgtaagatcagttatgtactttaacaccagcttccacagagaggaaatgaactgttacttaagagcttgtactgggaagcaatagttatttctttaaggtgtaaacatttagcatttgtgtatgcagtgaggtatatgttagataaatatctactccagacagtcaattggcaaatatttattgagctcccactttcttaatcagccctgtgccagagacagacaatagctggggtctggggattgctgctgttggtgtgcggatcatgcagagatactgctaacgcttgctccctccatacctggatcgtggtattgctgacatcattgacttagaactggctcatttaaacaaattgcagatagcaaccatgtgggtcagcagtctatttggcctgctttttttttttttttttccggtggggcagtatattttggcaaaacaaaatctggtcaacaacaattgtaggttgttgtgatatagttgatgtgatctagtgactcttttccatttctaccaatcagttactggctttgtgccagagcgaaatatagattcactaccgagaataataactaaaagaaggaaaatataatcactttcaaatttatatagaatggtcctttttctttttctcagttttctacattacatagattcttggaaaaaaagttaaaacagtctgttcagatttaggaagatacttggattgctggggtatttttggtaactgtttagataatgtatgctggctgaggagtaaattcagctactgcttctgggtcctgaaataaacctttcagaaagcgaggcattgatgattagtggaggcagttccagaattcttagtatctactgtttctttttgtgatgagcatcttagaagttaaaccactcaccatatttcatagccttatattgaaatgattgttaattctaaaattcatttagaagctggcgtctaatttgtgaaatcttgagaaccaccttttaagattcagtgaccatatatcaagctacacacccattttaatgccctttaaattttctgttaccactggtatattttataataaattcactctaactaatgaattataaatgaccttggaaataggaatgtggaacattgctactgctgagcaagtatctttctgaagaagcagacataattccgaggggactggcatgtttgctgtgtattagtttattttggtgattctgaggatttgtgagcgaataagcttctatgatgaggcatcctgacacaatggtaagatcatgggcttggagctggtcagaccttagctcatttggaggcctcagcacccattttctctgcactccagcagggggtcagtttccttacctggaatgttggctgctgggcagggttgttgaaaaccttcactgaggtcatggatgtctatctgtggcatctgtatgtggcccctctcttctctgcctacctgccttcccatgtggggcttgttttctcattctctgcctggtcctgctgtacttcggggtgtggctgactcaggacaagcccttgctggcatcaattaggtgatgctcagcccctcccagctccaaaaatctgtgctgctttgaatttttaaacaaatagtgcctaatcagctatgcaccgctgaacagcttattaaaccacactagatcccagacatattctgtgaatataaactgagacctgtgcaaatacatagatttttgcattccactgtagtttcccttacagaatgtggttttgtactgattgggactcttgctcagcagttgtataaattggttttggtttacccacagagcctacggctgatgccattggccccaagctgctaccccattcaatatcccatccctaatattaattagtggtctcttctctggccaacaatcattcctctgttatacttcctaaaccttcccactttgatgatctgcaaaaaatgactggctttttaggagaattactttttgcaaaggaacgaagttgcaaaaatttaaaagtaggcttcttggagattttgggtgctagactttggtctctcattagctaagtaacttgcttctgtgtttgcttcaacttcactgaatgtatgatttagacttgatccttagcaaaattataatttactatgcatggagggttagggctgctcttaaatagtcaaaacaggaatgtcaaatctaagagtaccggggtcctccctcaaatatataaagagcatttttttttaaatgctgagatttataaaactatcagggacaaaatgtaattctattatgaacaaatacttactgagcaccacttggtgcttaagatacacagagtaaagatgacatatgatccttaattttcccaggtgtattatcatagactcctggtgttttacaaagtggaaattaaagtgaatggctacagttttcttctgtagttcttatgcaaaaagactatattcctcaaagtgcaccatctaagaagtatttatggagtaaatgatgtatccaagctgaaactttcctaacgaatgtattattcatttccaatatcagttgcaaggaaatccgtttggtcagtatttgctattctatgtggaaggtcagtgtacttggagattgttctttggtgctgtgacgttgatgagaaagtgatcctaatttggattttgtattgggtgtcattcatatggtgatttttctgctaaagaaaagccttcacatcagtaacatgaaggatttaatactcagttcatttacttcactgtattgaactgtgtgcgtcagggctttggaactatagattcgtgtcatcacagcaataatgtgggcagaaggcacatgtttgtgaagagctcactgtgtgccaggcatcatgctgggtgatgggattctttggtgacctccacaaatggacaatgcaggaattaaggacaagtaaacatgctacacagtaaggtgtaaaggattttgtgaaagaagttttgatgttagagggtcactttatatagattaggttggggtggagttgaggcaggaaggctcctacagcaaaggaggtctgatgagctaagacttggttaatgagaaacaaacagtgaaggtaaagaggcatggggcttggggcaagggctagagccaaaagctggcaggttagagagcactggaagattatgcatttactagctgtgtgacctcaggcaagtcacttcgcttctctgtgctgtgtggtttcctcatttgtcaaagaatgggaaaggatacttaactcatggaattttcatgaggactaaactttataagaaacgtgtatgctgcttggcaatgaaaaggaccttttaatagagtaacaaaggattgtattttctcatgaataaggaattaaaatgagttagaggcaattctctattagttaatttaacaagttacttagcagcctatcggtctttcagagcaaataggtttatatttgaagcttagttctaatccataccatggcagttttcaaatttcctgatatgtttttaccttgtccagtgttaggaaaagtaagttattgagcaattctaaaatgtttactgtagtttgcctgttttttaagcagtcatatttttaactggtgaggaaataaattcagaagatttataattgaagaatttaattttcctaccatcagtaaacatttagtgacgttggtgtaggggcactgtaccacagaagtagatatccagaaaatatttgtaaattgttaaacattgtattaattgttgagcatagagtgatgtccttagattactgagtaaacagtggtgattaaattaattaagatagtttgtggggtgtttaaattttacttagtattccatttaattagaaatacagacaataactctggcctcataagcaatctgaattttgagttgaaggaaatgggtgtctggcagacaatttccaaattggtaaaatggatcttttgcttctactttattttcttcatgtattaaacaagtatttattattgttgactgttggaaaattttaaaaattacagtcatactttttatgactttgctgggtgtggaaatcatccctttccccccatcttagtgccaactgcctttaacctgaattggctgatgcagaacgcatttcaggaaggcgccatgcatacaggaggcagagacatgccctctgcaatcctgacttttcctctttcacccatgtctattgtatatggcaagactctgtccttcctcctccactctgatattggtcggagacacaagcacttagaagcaccagtgttttattctacaattaattactgaagagggaaattgaaaggtaagcagttttgtgttttatcttttattatgcattaagtttctgtaattttccatattgctatattattagtgagaaagagaagaatagagaaagatggagaagatgaattttatttaagacagttatatttggataacttaaaagaatatgcttttttagtctaaataccctttcccagtctaagtagtttcatgcttcatggaaaaactaatgcaaagaagttgtaatcagctgttaagatatttgagccagctggctgtcaatatgttgaagttttattcttggtgcatccacaaattccatataaatgtattttatgaagaggaaggtgtactagcatggctaaactggtaaagctgaaatctggatttgatttgcatatgtggtatttttcagggactctcaaactttcacacatgaaataaacgaggtaatgtgtatggcatcacatgatcaaaatatttttccccttgctgctgccagagctatctattgcttttcaacagtctcacttgttgggcatcatgccaagatgtttaagacaaccccttacgtgagctgttccattcttaacctctttgactgaagtgccgtgaccttcacatatgtagattagccatgtgctctgtgaattgaaacttgctgcctcaggaagaaaagggtttttctttttattccactgggaatttgacggccattcatccctgacctgggcagaggtaatgcaaggaaattggattcaaacggaacacggacagataacacagggaggcagtcagcgtgtacaggcaggcaagctttctacctggtccagggtgaaaatacccaccgtctgttcacaatgtgctgatgtgcaggatccgaagagcaactgacagatggagatagagagataaatgtaggaattctggaaccgtgtccttttaaaaaaggacattgttattatgggcattgctaattcgttttgactctcctctttctcttcctttccaaactatatttttgaaatctttgaatttttgtttatttcctaatgctaggaattaaatacttttgacatagtggacaatttagatgagtctttcaaaagcagaaatctttaaaaaaaaggagagatgaatgtatgacctgtatctggaattttgaaatgaattgatacttagaactttactcatatgagagttattagctttgtaatagctgagtatttttattatagcactgttatttatggctcttctaagtctttctctaaacctacatttctttatttgagaggcaagaatgagaagcagcatatccataagagttttgccaatcactcctgactagaatgacaagctgatttcatgtttccccaagtatcagtcctatgcagccccccctttttaaaaaaccatgcaaggccggacccagtggttcaacacctgtaatcctagctctttgggaagctgaggtaggagaagtgcttgaggccaggagtccaagaccagcctgggcaacatagtgagactcatcatagtgtaatgatgaataaaagtaattaatagcacatttttggatttttattagacaaagctagttttaaagaacatttatctttgccttgttaataaacatacttgcagttagtgtaaaattcagtataaataatagtcatggtgcttgagtaggctgataggacgagatgcataaggaaggttgtcgttataagaataatgggtctgaagtggtactccagctagtgtcttagcaaaaggaggggtgcttagggcagtctgaaatttatgagtgcttttgtatagctttcaaagctgagcttttcctgtgtacattagggtttatgaaatatcgtgggtcagagcatccgttacaggcgctgtgggagctgtcatagatacctggctctttccgtgggtgtaaaataggtttagtccttaggatgtctgtgtagggaatgtgcttaatggatacgatagactatgggggaagcagaattatccttttatccgaggatgacttgtttctttttaaatgaggacaatgaaaaaaaaattgggggaagtatcttatcacagtcttgtagaatgtgggggctttcgtggactgcagttcgcatggcaggcataaggagcgctaatccagtgatgacagcatctttatgcctacctgggaagatgcagcagccagcacagccctaatatcagattaataccggggtgggggcatgaggcatggctggcacctgagaaggcaaaagggaattctgtgattggagaagaagcaaggcaggtgtgtcattaaggtcaggatggccaagtggagagtggtcctcctggtgcacacagtgaaggagagcagccagctgggtgcagaggaggcagcagaaatgtcagggtgtccgtgagtcagcagctgagcattgtgggattttttttccttttctttgagacagggtcttactctgttgcccaggctagtgggcagcggtgaggtcatggctcgactttctgggcttaagcaatcctcccagctcagcctcgtgagtatctgggcctacaggcacatgccaccatgcctgcctacttttcaaaatttttgcagagatggggtctcactgtgttgcccgggctggtcttggactcctggcctcaagcagttctcctgcctcagcttcccgaagagctaggattataggtgttgaaccactgggcccggccttgcatggtttttcaaaaagggtgggctgcataggactgatacttggggaaacatgaaatcagcctgtcgttctagtcaggagtgactggcaaaactcttatggatatgctgcttctcattcttgcctctcaaataaagaaatggaggtttagagaaagacttagaagagccataaataacagtgctataataaaaagcaatagtaatagtaataatgactaccattaatgcactcctagtatgtgtgccaaggcacattgcacgtattatctgcaatcctttcaacagtcttgcaaaagcatcatcattatctctattttatagacaaggaaactggtagaatttagaaatttgttcaataccctggtttttctggtgctaaagcctacattctttccactaaactagtggttttcaaacccagttgtgcttcagaatcacctagggaagtaacccctgcccccaggaactcagatgccatcaggctctggagtggcctggaagcccacctttctgtctgtcagtagggccactgaagagcaagtggtaacatttaaaaaaaaagacttcttttttgttattgctaagacatgtaaaattgcattcttttttttttcttttctttttttggagacagagtcttgctctgtcgctcagcctagagtgctgtggcatgatcatagctcactgcaaccttgaattcctgggcccaagcaatcctcccaccgcagcctcctgagtagctgggaccacaggcgcatgctacaatgcccagctaatttttaaattctttgtagagatgggggtcttgctgtgttgcccaggctggtctctttacattctgggcggctcaagcaatcctcctgccttggcctgggaggcctgggagtctgggcgtagtcattcacatgaaccatggagcctggcacattcttttttttttttttttttttttttttgagacaatttcacatcatcacccaggctggagtgcagtggtgcgatcttggttcactgatcgcaacctctctctcctgggctcaagtgactcccacctcagcctcccaagtagctggagttaaggcacgcaccaccacacctggctaatttttgttatttttttgtagagacgggggttttgccatgttgcccaggctggtcttgaattcctgagctcaagtgatccactcaccttggtctcccaaagtctgggattacaggcgtgaagcccttctgcacctggcccacattcttataattcaggagcttttagtgtattttggctctgtagtcattatcagacatagaagaggcaagaatttgggctacaagggctggagggtggcattgggattttctgatcacatcaccagacattaatttacatttgttcttcagggaaactccctaccattatctgggtcattgctccctaccaccgtctgggtcattgcatagttacccagggtggccgtgaactagtcagcagccatttagaggaaagcctgcttggcttggctggttcaggaggcggaggctgctgcagggcctgggaaggagtaaggcagcacacggtggctgttaggtcatttgtgttggatgaaagagagttggtgcacagactggacggtgtctcagattcgctggggtttacgagtccagaaatccatgagtccgaggaagtgggaagagagaataagggaagggaggccggaaggtaggagagaaggggaaatccaggcagccggatgagagataattttagagtaagaaaccaacaaaatataatattcattatgtacccagattgaagtactatggtgctaaaagttgtcaaccaaacaccaaaattagcatatctaaaaatcatcaagacggtaatgcatagttaaaagaacagatgtaaggcagaaaactcctccagttcttcagtgaggttatttcatgacatagagtcttgattatttctgtctttgtagccacacggtcattttggagccagattcagtggtgttaggaggttgtggaaagcactcagcggacaccttctttccctccctccccaggctgcccaggcctcctcaggtgtgggagggctcccgagaccctctgcgcccttccttctcttccttattattactgtgccttatgggtaaagtacagtactgggaagtttctctttatgtccccaactattcctctcttctaattgccaataaaactacatctcacagctttttaaaaaaaaattcagtttagctcataaccttgtcttagacaaggggtgtaagttaaatttcacgtaagcggtcctgctggggttcctgcgcggtgggaaagctcggcactgctctgctcatgcctgtttgcggtgggaaagctcggcgctgctctgctcatgcctgttgtctgggttttcagcgtgtgtgctcctcatctgctttctctctaatttgaggctgagactgtttccaagtggcatacccctgtaattctgtttttagcttagaattaaatgaagtctttgctgtctcttgtttcctatttcataatatttcatcttgctttattgtttatggtaatgtatcactatcagggttatcatggatttccagtttttcaagttaaagctgactgtgcctaacccatctcaagcaaatcagtgggcagtttatttttaagagcccacaggaagaaaaaaacaacaaaatctgtaacctgctttttaggcttttgccatgtgtctgtaagactggacctttacttttttttttttttttttaaacttatgaagggactgggcatcttcatgtcttagcagccacgtttaaatctctgtcattatgatgaaaggtatcttttgcctagaaagctaacacctgtctacttgtgttatttctttcagggaatttcagtagtaatgtatcattcatctagtggtaagattttcagcaatgagaacattctgaagcagctgagaaagccctaataaaataactgtcagaatgctcatgagcttctctctgttggagaagaatcaagccatttcctcctcttccaggcatagagaatagttatcctttttgccatattacaaggacagagtggagaagttcgtcatgcagctgtgggcgcaggctagtgtgtggggctgggggaagcagacaagtggtgagatggtgggctctgctaagccctggggtgggcgtaggagcagaagccagagcctggggcctctgagtgagtgggctcagtgaggggcaggcccagcctcatgtgctttgaggtctttgagagcctcagacaccaacctggtagaagaggcatttggagggatgccttccataccccaagaccctgggaaaggagagtggtgagtcagggttgggtgggtgggaggcctgagttgattgccagcagctgccagataccatgcccctttgtgtatatacttcctttattcatcaaatagctgctgccgtctactcagttgctgggtatctattcagtgcctgctgtgtggcagagtgttctaggggctggggataccacagtgacaaaacctagtccctactttcataaggcttaccttccagagaaatttaatcccagagacagcagaccaaccacccacatgggggtgctgccgtttattgtagggatgaacagcagtacaagggaattcaaaataatggaacattttcaaaaattggttttaatggagctgtagatgaatatgcagtaaaatcagtttggagaggagctatcgcagctatttctccagtctttcagatgcccggcctgagcctcttgtgccataggacagttgttaaatgtagcatttccattgcccgtggttgaaatgaccagtggcagccccgatgccacctttatttcctcaaggctggacagaagaaccttgcaagcgcaaggttcttgacctgactctatgggaaggaatcatacagtgctggattttttgaaggtgttcctgcttttggatcatctcatgtacttggtgccaggctgtggttttggatttggacgtgttgggttgagatggtttccagacagctcgatggagatgctggagcagaaggaaaagagggatgtgcagttgaggcgggcacaagggccgcagcctgaggtgccagctgagaggccaatgacactgccctgcggagcacgtgcctggtgaggagaggtgcctgggcgttctagggggcaccaacctttagggatgaagaggagccacccagagagccagaaagggcgatggaaaagctgaggagagttccacagggggcaggaagacatgcacaactgaggtgagcactgaggaatgcccagtaagcctgggggctgacattgtggtcatttcgtcactggtgaccttcagaggagtggtcgggaaggcggcagtttgcagtaggtggagcgagagatggataggaagccagaaaaaggctctggacagctggaagaggagcggggtgtttgatgtgttgttcttttgctggaagagggtggagcgcctgcgcctgccgctctgctttctctgctgggtgctgtgctggtcgctccctcctggggcccctgcatgtccacccatccttcctcctctccggtgggcctggagctgctcaggggaaggcgggagcacgcctggctctttgtggcccagtgcctggggtcgtgcctggcatgcggtggggctcagattatgctggtggtggtgatagagttcccttagcactcctaggtgacaggctttcccctctgcatttcacagattctaaggtaacgtacaacgaagggtgcatgcgctttggccaaggccatgttacatgatggtaccaggagtcagccctgaggcagatgaactccaaagcctgtgctgccctcgctccttgttgagggtggagaatatttcactacctttgtagactgaggggaagattatttacaaatatttccagaagattagttttgtaatatattgaactaccagtatattttggatgcctttgatctctttggtaaactggattgtcaccttgatgtagtgagtcagctggcttggtggaggcatctctgagtgtctggagaaacttcatagagattattgcatttggggagttagttttggtcattgccacttgtgtggcgaaaatcttgggttaaagcatggtcagcatgagtaaatgttgttaattgtacattttctctttaccccctctgaaaccttatgtttgagagctgtcattcaggattggatactaaaaaacttggcagttgtgaaatagttttctctctgtgtgtataggttattctctgatgttaaaatggctaatgctgcacaggtgtgtatttcctaccatatatttataaaaaaaccactctttaaatttcaactcgtgtacatgtcccatctcaagtctcaagtattacagactgtaggtcagattccctcatgatatgtggaacctcaaagggaaatcaattgttttgctgttgtagtgaaatactaagtattgaataattaataatataaaataattcatcaaataatttctaggtgccaagcactgtgctaagaactctatatgcattttctgtgaggtaggttctattactgtactcatttgaggcacacatctagcgagtggcacagctgcagtttgcactcaggcattctgaccccattgccttttcatatatgctgtattgcctctcaggagggactggaatgagtagagttggacaagtggtctgaatttacattgtgaaaggtggcgttatgatagattttttttattgcttgcttgcgcattcacatcagttgatatatatatatttggacacggagtcttgctctgttgcacaggctggagtgcagtggtgctatctcctcactgcatcctcagcttcccaggttcaagcgattctcctgcctcagcctcccttgtagctgggattacagatgtgcaccaccatgcctgggtaatatttgtattttttagtacagatggggtttcaccatgttggcaaggctggtctcgaactcgtgacctcaagtgatctgcccgcctcagactcccaaagtgtgaggattacaggcatgagccaccacacccggcctcaaatcatttgatattctatgaagatactggaaaagctgatgaaagatcttcctttccctccaagaggataccatttggttagagagacctgtgaaacagaatcattgaagaagctgcgcagtaataagactcccagccagcaggtgaaatgagttttcttgttttcggggtcctaggtgacatggctctaaggtgcccacccggaaccctcacccccacccctgccatggaaaacacttttattatacacatccctcctgtcccaccagttacaaagcagatttgaactgaagcgtatttcttcttttgatgagaatgtgaaaggggatctttgtacttggttagttttcattacaattcccctttcctaaagagaaaactcagaatcaggatgcatttcatgtgtctgaagaacctttttccaacataaaaccttttcagcattaaaagtatactctgaaatggctctgttcagtatggcagccatcagctttgtgtggctatttaaattaaaattaattaaaattaggttgggtgtggtgggtcacccctgtaatccaacactttgggaggccgaggcgggtggatcatctaaggtcaggagttcaagaccagcctgaccaacatggtaaaacctcgtctctactaaaaatgcaaaaattagccaggcttggtggcaggcacctgtaatcccagctatttgggaggttgaatgaggagaacctcttgaaccctggaggtgaaggttgcagtgacctgagattgtaccaccgcacttcaacctgggtgacagagcaatactccatctcaaaagaaaaaaaagcaaataaaataaattaaaattaggctgggcatggtggctcatacctgtaattccagcattttgggaggctgaggcgggagcatcacttgagcccaggagtttgagaccagcttgggcaacatagtaagaccccgtctctacaaaaaattaaaaaattagccaggcatggtggtgtgtgcctgtagtcccagctacctgggaggctgaggtggaggatcacctgagctcaggagttcgaggttgtagtgagccactgcactctggcctgggagatagagaaagaccgtgtctcttaaaaaaaaaattaattaaatgaaattagttaatgtctgcagtggcattagccacattgtatgtgctcagcagcacaatctgttgtcagtagctgtctgtcataagttgcaaaatagatctagaacattctcatcactgtagaaagctctctgggacagtgttctagagactcttgagttgcatcttgtagtatttataacaatttaaacctactagtactgtgcctggctcttagcaagtgtagaatgtgagctacttgaattttggatggctgtcagtagggtaggatcttgaataatcttttttttttttttttttttttgaggcggagtctcgctctgttgcccactctggagtgcagtggtgcaatctcggctcactgcaacctctgcctcccggtttcaagcaattctctgcctcagccttctgagtagctaggattataggtgcccgccaccaggtctgggtaattttttgtatttttagtagggacggggtttcatcatcttggctgggctggtcttgaaactcctgacttcatgatcacccacctcgccctcccaaagtgctgggattacaggtgtgagccaccgcacccggcctcatcattgtttttgaaactatctttgatagtacaaatgtattgcagttatctaaactttaaaaataatgaaaaaccattaaaaccacattataaacaaggaaagattttttcctctgcttgaagcatctatccaggttctgccatattgtctaaggatggtaagagcagggtggggtctgtgtttttgctttttttttagtagtagagaaaaggctgtttggaaccaaacatgtggaaggctgttttacttcactttgttttatatccactgaaaataaatgtaagtttagttagtgttttttttcttccacgatgtttgaaggaaagtccttgatttctgtctgtgttgcagtttgaactttaacctgtggcctggtagttgaaatggattgtgcattttggtgtggaaaaaaaatcgaattgctttctcgaaattgactaaaatgttttaactcttcatagcaaatgaggcgtgaaacaaattgtcaaaagcatggagacaaaattattgcagtactgaatgtttaactggttggtgctgttctatcgaaggtgtgagccaagcagataaatgtgtaaacggcacctttctccttctctcctacccaatttttcacagcttgtcttcacgaggagacctccatctatgtcagaaaaatcacagcccttctgaaagtgttagattatagtgttgctatgaggaataattaggaagtcctgtaggctatggattagaagaaataaacttcctgtttgcaaacattttatttcacatcatcattagatgaagcaaaaatacattttttagtgtctctgaaagcttgatgatatgtaaaggatgttagttatttatgttcatattctttcgtattcattcattgtgtttcattctacttggaatattttacccttctttttaggatttagtagtttgaataataatgcttaacctgaaaaataataaaatatttaaatcatatactttttagttttaaaatatcaaatgttaatttaaggaatgtccagaggtttaataaggaggacttcaaatttttgactgttccttcacttttctttttgaagcttctatttaggttcttaggttaggatttctcaagatccccacctattagatggctacagctctcctagcccctggggctttgatttctaatgtaggtcattgaatggccaaaacagatgtgccatacagagtgcaaagcttttaaataaggagaaagattatgtattggcattgtttttttgtggctaagtataagttgagggttattgtttatatttctaagtatttttagcatctcataagcaaagaggtggatgaatatatgtgtacatatgtgtttatgagtatgtagctgtgtgttatttgtgtatgtacacaatatgtttcacagttttattataactacaaatatgaaaaacaattaaagcgtgatccttatgctaatgcagctgattatacttttgcatgtttccatgtagtttttatttctgatgggtgtatgtgtgagtataaacattttttttctgtcctcccaacctattttgtttttttttaaattactgctatagcgataggtatatgtaaagagtataggaaattgattatacaacttccaagcaacgatgttttctttttatcagattgactctagtatgcagagatgatggaattttcgtgcatgtggtcttgtacatttattaagccttttcaatgaagatttaagagccaacattttatttatgaaattcagtccacatttataatgttgtataatagaaatgtatgtacatttcctgtgatttttcagtatagaagaataatggatcttgcaaagattgtagttgctgttacttacctttttaagagagaaccaaaatattttcctttcctttcctttcgtttcagtgttctctaagctgtgtgtctatctataaatctttatccatccaccatcttcctccctctgtacttacctgtcttaaacttacctagacttacctttgccttcgttttgcatttatgatttttccctcctttctcttcaagtgaatgctttatttttgttttcatggtgtgtttttttcttgctttcattttatctttttctcttttttttttttttaaattccttttttgatctagttcttcctgcccctccacagctgcccacattgagtgggttagttgtaagtgtcccattccacatcctgtcttgggtgggctttcctgtaagatttttcctgggtgtctgttattacctttttttccaatacatattaaaacaattggccatttttcatcatgtttaggaaacacttagccttgttttcctcatctgcaaaatagggatgatgaaacgtaatttacgtggttgctaagagagctaaattagttgaggtgtgtaaagcatatagctttacatccaatgtgaaataagtgttcattaaatgttagtggcagaggtaatagtagttgtaacgttgaattgcctggtatgatggagaatgtttctaaagaacacccctcaaggctgggcatggtggctcactcctgtaatcccagcactttgggaggctgagactggctgatcagttgaggtcaggagttcgagactagcctggacaacatggtgaaaccccatctctaccagaaaatacaaaaattagctgggtgtggtggtgcacgcctgtagttccagcttcttgggaggatgaggcaggagaatcacttgaacctggaagcggaggttgcagtgaactgagattgcaccactgcacaccagcctgggtgacagagcaagactccgtctcaaaaaaaaagcaaaaaaaaaaacacccctcaattttggattacattgataattaggggccagatcataaagagagctttatttactgtattagtttgttcttacactgctatcaagatatacctgagactgggtaatttataaaggaaagaggtttagttgactcatagttctgcatggctggggaggcctcaggaaacttagaatcatggtagaaggcacctcttcacagggtggcaggggagagaatgagtgcccagcgaagggggaagccccttataaaaccatcagatttcgtgagaactaacacaatcacgagaacagcctggaggaagccatccccatgattcaatcacctcccaccaagtccctcctacaacacatggggattatgggaactataattccagataagatttgagtggggacaagcctaatcatatcaacgtatcatgaaaagattacattttattccaggggtcatagaaaccattgaagaattttactactaagagagatgtgatctgattggcaaaaaaaaaaaaaaaaaaaaaagaaattggccctttttgtgtcttaatgttcctatttcacccacccttaaaatataaaatttaaagattaggcagtattactaatggccagtacttataaagtgacatgtaaataggacaagagtttaacaaatgtaaacatctcactaaattttagtacttcacttaccaacccttggatgtttagctaataattgctaattataactatgcatttgtttgcttatactactctggcaggaacaggcctctctcagcttactcagtaggccaagttagagattctgggttgggccctagtttttcagggatgtagtattggctcattggatttaaatcttagggaaaatctggtggagacactttgcctccacctgcagcctgctgtgctggatgtgtagtgagggaatgagacaggataggcccgagagtaaagtggtctgtttgaatccccagttctgccactcattttttgtaaaatgggaataatgataatatctaagttctggggttattttgaggattaaatgaggtcgcatgtttaaagcatataggatgttgtccgagtgtcagcttttattgttaccattactattcttgaggaaacctagcaggtttacacttcaccaaggaagggcagctattggtttgcctataggagtatgctctctctgctctcagagggcctacaagaaaattttttttctatccaaatgtcacctttgcttttattttctttcctttccatacacggaagaaaaaataggaaaaagaattacatatactttgcaactttttaattatttatttaattttatttttttttagagacagtggagtgcagtggcaccattgtaactcactgcagcgtgtaactcctgggcttaggtgatcctcccatctcagcctcctaagtagctggaatcacagatgcgcactgccacaaccagctaatttttaaatttttttgtggagatggagtctcgctgtgttgcctaaactggtctcagagtcctggcctcaagtgatcctcctgccttggcctcctgatgtgttgggattacaggtgtgagccactgtgcccagccacatttttcagctttgaaaccctgtaatgtgagttccccctcactccagttagaaagctcatttctaatttccgtattggccactttttctgtgtcacattcactaaattaggtttaatggtgggtcccaaaatcataaccataaaccttgttgaggttctgttttcttgtccataaaatggggattaagtgaattgctggaagggtgcgttgcccaggtcctcaataagtgataaactcacgttcagcacattcaacaaacttttaaaggtttttaaataaaaaaagcaaaggcttatggtctttggaaggttcttttagtttctcaagttgggaccccatgccttaccgtgccactgagttgaagaacaggttctacctctggctttcagaacctccttagagctggtttggaggtgttcctgctctctacgtgtcctttcttctaaaaacacatttcacaaaaatacatttcacagactttactgtatcatattttcaaccagagtttaaatggggattgtttggttttgcttaataatactactttacagatgatttaataatttccaaagtgcttttcttatctagtcctcacagtaatcttgcgaggtttggttaatatccctgtttcgtgtgtgctgaagcagaagcacagtgacttggctaaggacacgactttatttcaaaccaggttttgtgacccaaatctgagcttttgcacctcacactgttgctgtggtgtgttacagtgattctttagcttagagacacgtttggatcagggggtcagcaaacttttcctacgaagggccacatagtaaataattcaggttttctgggccagatgatgtttgtttcaactactcagctccgctgaggcagtgctgaagtgtccatagacaatccgtaaatgaacgtgggaggaggctgcgtgccagaaaagctatggatgctgaaattgaatttcatgtaattttacatgtcttaaaatattcttttgatttctttcccccaaccatttaaaaatgtaaaacatattcttagcttatgggtcctacaaaaaccaagcggtggaccagatttgtctggaggaccgcagcttgccaacccctggacagcgtgcgtttttccatttccagttccgtccaagtattgtgcacccccccaccccccacccagtgaagcatctttgtttgcacaactctttattctctagcatctcagctaacaggaagctgggagaaagttcagatctatggagtggaagagcccagggtgaagggagccagcggatcacgtggtgtcggaaacgccttaagcaagaagcttgcatgtcagaaaccaagctcagggttctctgttgtgttttggtttttactgcccgccatctagttgagtttcttcatgttctaggagctctgtcagttctttaatttccccccactagagttttgaggttttttcttaaggtttttttttttttgaaaaagagagttacagacatgtagtgcattagtatagtttgattattaaaagattcaaacgctggcaaaaacgtgtatgttgaatatttaaactctcatttactgcttccccttcccagaagtatatgctcttaagttaaatgtgtcttttagttgattttaaaatactgcatgtgaacatagacaattatataaatataaacatctgtatataagatgatattgtacgtgttctctgaccttttccttacagaaagttccttggatcacaccacagtggttcgactttttgctttgggtaatttgttgtgtgagcaagagaggttctcagttgtctaagcagtcactgaacagtgaaaaaacacaatatcattttttttgctgtggactgtggaatcattttagaatgtcaccctcttttgaggcagttggcaggatttgcccggaaggatcaggatagggtctttgggtctgagtcctgcgtgacttccttttctgacagcctcagatgcagtcctagactcccgtgtcattgagcgctgtccataacatcttaccatgagtgtgctataaaaatacaacctcttcattgttaagccgtgttactgttgaggctttaaccctattgtatcccaaagcagaagcagaggtagatatttcaaagtaattggatttagtaattgaaatttcaaaagtaattgagagatgagagcgtttcctatttggaagacatcagctggattttattttatttttcccgaagttatttgcattctgtcttgttagctttagaaataagaacagggaaaacagaaaggagaacatgtagtggtataatgtagatcttaaaatacttcagagttctcattctttttttggtatggtactcaataggtattctagtcaaatgtaggctatgactttgtaaataatctctcttgaaaaaagggagccttcattgtgttcttggcagcctatcacgtggtgctcttgtgagtgtgggctccagcctacattgaccgtgaaccagagcagccctgttactaaagtcaatgcttgtaattctcttacagtcctcataccacagatttccttgcaatcatacttttttctttcattctcttttttacctgttttgttttcagtctcagctaaaattgaatatatataagtgtactaactctctataaagaagtctttttctaatctacatgccactatgaaaattgaaaataaaaacattatctgtattgtttaataaggatttattcattagttgtgcacattctttatttgttcatttggttttaaaatatcaatgctcttatttttacttgatgaaaggagagaaacttcttttaacgaatgtttttagaggcactaaaatccttgattaaaaacagtgttaaggatttgtatttcattgtgctttgggagaaatgtcttaagatttgtacacacgagtttgttttatctgtgtgactctaattaaagttaatcaaagtcacatggcttagcaaatcactgaagtttctttttggaggtttttattcattttagtaatttgatttgttgatttgctattaatcttttaaaagtaaaacatcaataacctaattttataaagtatcaggtgtcttttttttggcctactttacgttacttactctgtactttcaagcaggcacataaaggctcagtctgtttcagctctgtgcactgctgagcagtgtcttaccatgactgacctcctgattaagaggaagttagcacgtgagagccacattgagtctgctggccttagcttcatgtgctatgtgagagatgtggtcattttgtacacaggatgttataatgggatattgacattttacggatccagcatcctgtgtataaattaagctttctttttaagaagacattttacagttgtaaaattctcgcctatttgaattttgagatcttgatgaaacataatccctggagtgctcttccactgttgcagtgtaatctttccatatgatatctgatttagttggaagcaacttagtaattatgcatgcttaaaggaagcaacttaataaacaggattttagagaaacccagtcagaattgtaaaatggtactgctgaatcaattgcattacatagaattactgggttagatgtaggtttgagataagtgggcagacctgaggctcctgtaccaccaccattgtcaagagcatgtgaagatttgcctttttcaaagaaaaaaaaaaaaaaaaaaaaaggactccctttcccttggttcgttcaaaaatgattcaaaagtagccttctcaagtctggtggctgagggccaccagaaagtggagcgggccttggttctgacatgggcttagcatggtaggctaggtaaagtcagctctgtggaggtgggcacagtttgtcatgtggtcaggtggcatgcagaggacaaaaagatgcagctctgaacttgaggatttaagcaatcatctgggaaatcagcacagcatgtggctgaggaatcagattcaggagggaggtgaagactgtcaggtgcagcaggccccatgtgtgacctctgctgctttacatgtgaaatataggaaggggaaaaataactattgaaaatcatttctgttccttgtcagcttatacacatgtactattaaatagtcacagtttaaactacttattttcagttcactattttgtacacattgtcctatattggtattattgctagcatttctgcaattttttgagttagaatttagggtgacctctcaagaatattttgtcatactgattccatctacagatatacgttgtggtaggttctggttataaaagtgtaaatggtaacagctgccatttaccaaagatccacctgccagcctgcctgctttatagatgaggggattgaggcctgggaggttgaggaacttgcctcagctcctggagctgcgttggattcctgctctcattctgtcttccttgtaaagcgagaggggtgttctcctttggtttgtaaactctcttgctatttcacagcctctggtgtccagaagacacataaacagacaatggcaaccaaaccttctaaattttagaacacaggtttcctcaggggtctctgatctcttgatcattttcattttgcctggtggtttcaagacaaacttgatatagaaggtgatccttgagtcaaggcctgaaagatgaggaatcagcccccaataacttctggaatcgtgtgtcttcaggcttctggagaatgtgagagcaccaacaccaatattttgcacagcagcaggtcttatgtgggaggggcaagagtgaggaagagctatatgaaatgtgtattatttgtattagcttgtggattagtttgctgttgctgcataacacattgagtggcttaaaagaacacacatcgattatgtcagtttctggaggttaggagtccaggcatggcttagctgccatactctgcttggggtcgtagaggctgtaatccaggtgtcagccgggctgcattctcatctagaggcttgactggggaaggccgcctcagactgttggcagaatttatttcctggtggctgtagaattcatatctgcctgcttcttcaatgccaccagcagagagagaatctgtaacttctgggaaggcctggaccctcttttaaagggctcaccagattatgtcaagcccatccaggccactgttttaacttaatgtcatgtgattaaggaggggctttaattatatcggcaaagtctcttcctttgctatattttcttagttagatgccagtcacaggtcttacccgtactcaagaggagaggattacacagaagtgtggatacgaggggcataaatcccatggatttattttagaattctgccaactacaggttgtgtgttataattcataaaaatagcagtggtttctgttggtctgtttatgctgccatgacaaaatgccagacagaatttctccctctcagttctggaggctggcagtccgagatcaaggtgctggcaaggtagttttcattctgaggcctcttccctgggcttttaggtagctgccacctctctgtgtgcccacatggtctttctgagcatgtgcagggggagagagaggatgcaagagcctgtgcatgcctgtaccagaagcctggtctctcttcttataaggacagcagtcctgtcagattagaacccatgctcatggcctcttttaaccttcattacctcttcatagacgctagtcccaaatacaatcacattggacattagggttttgatgtaggaattttggtgggggacacaattcattctgtagcaggctaagaaagtcttctagttacattctgcttatctcaagggatatcagttggggtatatatatagatgccttccccaaaaagcatcatgacccttatattataatatgaccttgggcaaattacctactctaggagatgatttccttcaactaaaatagtggttggcaacattaactactttgcaggatttttgttcgcattggttgtgctgtgtgtaaatcacctatagtgtgccgagggcacaggaggtgctcattaaatgttgtctgttgttgctgtatttgtgccttgatatttctgcatctctctctctctcttatttgaaacagggtcttcctttgtcgctcaggctggtgtgtggtggcatgatcacagctcattgcagcctcaacctcccaggctcaagtgatcctctgtcctcagcctcatgagtagctgggactacaggcatgtgccaccacacctggctaatttttgtattttttggttttgctatgttgcccaggctgatttctttttttaattattatctaccttaaatgaagaattccccatgaatccttccatttcttcaagaaagaagtggttactctcccctgaactcataggacagtggcatttataagcctctgtcctatagtatttataagcttatttttgcagtgtattatttgtatacatcttttgtttcttctgtttcttaaagtcaaggaccttcttatacctctgcttatctttttcatagtgccttgtacattaatattttttcagtttaaacaatgttgaatgaacaaataaatgaatgggcatggcctctgaggtaatgtgtttcctctttcatctaaatctttgtttctcaatcctttctaactcatgccttcttttgaaaatgtaagtttccttacaccccttccacctttcagtatctcctcccaaaagaccaggcccgcagcccccatctcccttgatgggacaagctcgacttttcctacagatcctcaacagttgagattattttatcaagctccactttcatgtggtatgttataaaaaaaaaaaaaaaagctttcctcctttcttttccaaatagaaaattataatcctgggtgtgtgtgtgtgtgtgtgtgtgtgtgtgtgtgtatgtatatacatacgtatgtatatacatatatatacacatacgtatgtatatacatatatatacacatacgtatgtatatacatatatatatatacacatacgtatgtatatacatatatatatatatattttttttttttgagacggagtctcgcactgttgccaggctggagtgcagtgacaccatcttggctcactgcaacctctgccacccaggttcaagcaattctcctgactcagcctcccgagtagctacaactgtaggcgcatgctgccacgccctgctaattttttttttttttttgtattttagtagagatggggcttcaccatgttgcccaggctggtctcgaactcctgagctaggcaatctgcctgccttggcctcccaaagtgctaggattacaggcgcgagccattgcgctcaggctatcctgggtgtgtattttaaccggaccctccttgtaaccctcgttcttatttatgtagcattcattcattttcacccttgagaattactgctctaaacaatttctgatatactgtagaatcctgttacaggaagtagtgaagttagaattaagtgttcaggtgcggtgttgtgtctccactacctttgcacatgtgtaagagaatattctgtcttccctttatatgattctttttaaatgacagggttaaactgatatgcatttgaatttgtcgaaccctgttctccaaaatgattccagtttgtgtcacttaaggagtgaccctagacatatattaggctttcataagacctttctctccagagcttacagcgctttgcagacattaccttatcaatacttagggcatccttgtgagccaagcaagaactgggagctgttgctgttttttttgcagtggaatagcacgagaagttcaggaggggcctgccctccagaccccatctcaaggatgtgtgcgctggtcagaccctgccttcatgctcccgcgctgtggattcttcacggtagcctgcaccacgagagtgggtacagtgtgccagcaaacaaaatgcctttggtcacaagataatagagtaaatttacaaggtgatgtttatttttaaaggaatacgtaagaatcaaaattccatgtactgaaaggaatgtaaaatattaatacatctggagtggtggctcacgtctgtaattccagcactttgggaggctgaggtaggaggatcacttgagcccagtagttccagaccaacctgggcaacatggcaagaccccgtctctacaaaaaatacaacaaaacttagctgggcatggtggcacgcgcctatggtcctagctactatgggggctgaggtgggaggatcacttgagctgggtaagccatgattgccaccgcactacagtctgggtgacagagtgagaggccctgtctcaaaaacaaaagcaccaatgtaaagtacatctggtctccacaggggacttcttttaagttcaaggtgtcttatttaaaagaggctgtgtttggaattggattgcagcaaatgggggttgttttaagcctgcccgcctctatattctggaagttatattatgcctttgaaaacaaattggcttggcgtggtcaatcctgcttttagttaatgttgaggatgtgggaaatgcaaccatgagcttgcgggagagatggggtcccaagatttagggacctgtgtagaattgggcatctttctgagaaggcagattgatggtaaagaaaagtagaatctttggctagtttgatgtttatgtgggtgcacttgaaataggatgttgtaggcaatgccgtctcacttttgggaggataatactcaataactattaaaaatcccctttcatcccttgttctgtactcctcattttttttttaatacaacaaatgctttttagcctaatctccgttaattgtgatgacaggtttttaggtgaagacccatcaattatcaatagactattaaatattaaatagtgagcaagaaattcaatataaaagtgtgtatgtaacaataatattcaaatattgttgaaagactgcgtgcttacgtgttttgagtatacctaaagtggatatactttgtgtctccattgtaaattcctaaaatttctggtcatggcttttttattagaaagtctaagaaaagaagagtatgggaaattgaaatggctggcagtagacaagtagcatgccactgtaagatagtgctctttttatcttgatatagacatatccagacatgtgtatattttgtaacgtagggtaaaattttctactgttgagtttgtccatatacattctagttattattttaagatagtaaagatccttcgtgcgctgatgctagattggtatattaattcacttagcagaagggtattgatattgagtgtaattagcatgaaacactttgaacttttttaggctgaaaaggataatgtaacttctttagttttcctcctttctccctttctccccacacccatttttaaaataacagtgcttttcatactgtcagaatttcatgttgtgacaccctactcagaagttatgacagcagggtaatgacagcaactgcctcctgaaaatcaatcaggcaattaattttgtaaatgaaatgctgattatacaaagcttcacatgagaggcccagtgattaaaatcaatttaacaaattgtttcaggtgggacttgattaataatttgccataaatgctaaggatatatgaccagcataccttgttgttgctgttactatccagctatatataaaaatcgacaggtaagctctatctatctttatattagtgacactttgcttgtttgtttacctaagtaggcctgggtaacagtgaaaatggaatgcatttttacatttttatgtcatcctggttcatgttttcctgtgttctgctttaaaaaacattgcccaggcaggtttgagttcaaccaagttaagtaagttttttctatataggacattttagacttttctcatgttaatatatgttatgaatcttgaagaatggtgtgcgctttatacacatttaccattcttaattacaataacatctattcatatactttgggaaatactgtttttagaatactagaaatagtgacattatagtatggaaattaaaaaatgcctatgtttggagcattatagtttgaattcagaagtcacttggaataggagatggatgtctttccagcagtcacataccaaacatttattaaatgcctgttataagtcagacagcatatcgattttcataattttattacttatacttgacacagctaggaagacagtacaatattgtttagaaaaggatggcttggagagaggtaagggttaaaagatgcacttgggtttctttaattttgtttttttattaaagaaataatagcaataatggttgtccattgggtgtcagaagttggggctataaggaaaattagggtgaggaaaaaacatatctggccttaaagaacttactgtctgataaaggaggcagagataaacaatgagttgcagttgatggtgataaattgagtatctgttaaataagagagctgtggggaacggtggagccttgtgaaggcaggctgctggactcactggtatttccccaggctggaagtgcgtcttccgtttacagggcagccacagctgtgctgggtacagagtgttctagaaatgggtttggagttgtgtgctcaggcatcggcttggtggtgcataagagggctgtccaggtacagggcgggctgaggcctgataggtcgctgggcctgtcaccttgaggctaaccttgtttgtttgaatttgtccttctggagtttggatttttcggacccctttatgtcctctttcttacttttgatcttcaaggaagtttattgataagatttctgatcaaagaatggggcagaaaggagaagtgtctctaacagtccacattctttttgataccacagcataatcagaaggtctggcagggagggagaagggaagattctagaattatcgcacgttagaacaataaggaacttcatcccatttgccctttaattaaaaaaaaaaaaagaaaaaaaaaggccgggcatggtgccttacacctgtaattccagcactttgggaggctgaggtgggtggatcacctgaggtcaagagttcagaccagcctgggcaaaaccctgtctctactaaaaatacaaaaaaaaattagccaggcgtggtgggcaggagaatcacttgaatccgggaggtggagattgcagtgatctgagattgcatcactgcactccagcctgggcaacagagtgagagaatccgtatcaaaaaagcagcctgatgttgtgactcacacccataatcccagcactttgggaggctgaggcaggaggatcacttgagcccaggagtttgagaccagtctaggcaacatagcaagaccccatctctataaaaaaaattagccaggtgtagtagcacacgcttgtggtcccagctatgtgggaggctggggtgggaggatgggttgagcccaggagtttgaggctgtgtgagctgattgcaccactgcactccagcctgtgtgacagagcaggaccttgtctgactcttaaaaaaaaaaaccacacacacaaaacttttattttgaaataattttaaatttacagcaaagttgcaagaatagtgcagagaagtcccatgtaccttttattctgatgcattacatttttacattttgctacatttactttattattctgtctgttcatctatccatctgttcatccatcatttatttataatgcattttctcagaatcatttttgagagtaggttgtatacattccgcttctttactcctagatacttcagggtgtatttcctaggagcaagcatatgctcttacacacacctcagtgcagttatcactgtcaggaaacttagatttgattgcatactttaacctacagtctacattctaattttgtctgttgtcctaatagcatctatatagcaatcttctctccttcagtgtaagattctgtctggcctttatatgttgaatttagttgccctattttttttttttttttttttttttttagaatataagatttgaccatatattagtcatgttaacttgtttttctttaatgaagcacattacagtaagagtcaatatatgcttacacatagttacagctctgacaaattagatatctaatagggtcatatctctgaaaagcattttaaaaccaggggcaaatagcctgtgtatcagcatggcaagcaccctttgtcccaagataggtaagtcagttggtaattttcttatcttaactggcattttaatacaatttttaagttgtttatttaaaatattgataaaatagttggaaagaggcatggtagcaaccatagggattgctggggaaattagtaacttctctgtctttacgtagtgctctgatatgtgtttggaattgtttatccttgcaaatcacactaaacatcttttgaatggttgtctgagggaggtattattatttttacttgagaggtggggaaattgaggcttagagcacttcaataatttacttaacatttcatggctagtcagaagtaggagagagatgtgaacccaggtgtacctgatgacatacttttaggctctttccattttactggagatggcaaattactttttgcttgtgcaaattctgatagttgacacaactgcccgcaactctgcaggacaaaagattctgaggcttactggacttagagaaaataatgctaggattgattagcaatgtctgtcttctgcacattgatggaggagtagagggtttccatgcctcattgattattctggaattatacctccatataataatgatgataataaaatctatcctttttaaaaaaaaaaaacctgttatgtaccaagaacttgaatgtattatctccagttctgtaacagctctgaaatgatagtggtagtgttctttgtgtacagatccattaactgaggtgcaaggaagttaagtggtagctttcttcagtatcacagagctacaagtggtggggttaaaatttgacatagtctcacaaaagcttctttctcaatttgaatctgtatttgtatgggaaatataccatattatttctccttcttaaataagtgcttgctactaggctgtcagtagtgacacatggttatgaacaatactgcatacttagagatgtaaatgttagaaaatgttaaagccatgataaaagctttacaatttttttgggtagcaagagtaacaaatgtgaggaaaaatggaaatatattctattactattttggtattccttttagatctaatttactctcaaaataaacaatatatatagcctttggtttgttcataaaattattacatttgctaaattaaattgaaaagtgtagcttagtcagacagtaatttactcattgaattgacttacaagctgctgagctttgggggatgaagctaataataggttttgccaatttataaaaatcagggaaaaactagggaaccaaaatagtcttcctttctggacttattctgtagcacctggatgatagctataaatgggttcaatacttgtttttctcctcttccgtactcctgtttctctgggacagtctaggctgggggacagacattgatcaagtagtcacacagatgagcccactgttactctgagaggatcctgcccgggcctggagttcagggagggctcctctaaggacatgacgttggagctgagttctgcaggaggagaacagagctcattctaggtgaaagaatgacatatttgaaatgtgtggtttttctagagccctgtggaggccagcatggttggaggggagatttcctgctggcagagatggggggtcccacagattgacttggtaaggagctggctgtggtggagaggagaggaagggtcaggatgtgtcctggattctgacatgaatatctgggtggatggggtgtctttctctgaggtcagagagaggcggagaggagcctgtggatgtctgggcaggaatgctgtgcagagttctggggcttggaggaagcagccaagggaagcagcatttgggagacagaagcttggggaggtgatggaagccatggtctgggtgaacttgtgcaaagtgaagctttgtctgcagggaggggagactagaagggtctttacctcttttatctagtggtcatcaagaggcctacattctagttagagtcctgctgtttaagtggccatgtggtattgaggaagctgttcctttctcatgtcaacaaatgttaattatgccaggcattgtactaagtgctaggtatgcaaagatgaataagacaaaattttcaccttgaaattaacagtctgctggggagacaggaaaatatgtagattaaattattgagtggtttagctctgccttcaatttgctaatttgttaagagtaaaataaaagagatttaggaagttctttttatgtgataaatcctgtggtatctcatttaatccaccagcaacactgcgaggtgagtgtgaccgtattctgttgaatagcttaagcttacctagctaataagcagcacaggcaggattctcacccaggtttgtctgacttgaaaccccctgcctgctccgttataaccttttccccaaattatgtttctaaactttggatttattttatatattagaaaagatgtaggaatttgaagtggtcaagaggtggtcacctaaaggcaaatatggtattgtacttgcatagcaagagtagtgaaggaatgggaggtttcctgggaaccagtggaaaggtttctgtacggatctgcttccagaacgctgatgcttggatttaaataccagtctttatgaatagatttggtagtgagtccaaggctctgtctcccctcgcacctcttcagtgttttcattgatgaagacttgggtgaaatagtatgctgatttcattgatggttgatgtcaagctagaaaatgcagttactgtaatatgtcagatccaaatcaagatttgaaaaacaacctcatcctggtagaatggtgatcagaaataagcgaaatgcaaacaagcggagataaagaccaacttcttctactagggtcaactccccaagtgtctgataggagatggggaggtggggtttagtcagctgttggtggggatggggctgccaagagcgcagagctcttagactgtgttgtcagcagtgcaggttctagaaaaaggaagcaagaactgctcccccactccccccacaataccttttgtgttgagggggctgagaatgggtatatgtcacgcagaaaagagaaatagcttacagcgatcttcaaatattctgccaaaggaccaaagtaataccaatgggtataaatgacagggagcagacttttgttacataggaggaagaaattcataacattcattgtagatgctttgaaaggatttgtatgtacatcacttacggacccgtcaggctctctgcagttctaaggttctgagtttcattgctgaatctttgaatctttggtcaggctgtcttaagaattgtgataacgtgagaatatattaaagtgctttggaaatgcatggcatatgttgttattatttgataatgtaagtctgggatctttggatgggtttctagattagattccatgaactcctctgacactgtatgctaaattgagggttccatggttccacaaatacatatgttctctgcaccttgcttaagaaaaccaaaaccaagaccaaaaacacaggcagtggtcatctttctcagtcagttaggagtgttttgaggtctctcccccaacattgctaatgatgtcatggttagagggcaccgataatttcatggttcttagagttaataacaaaacaaccttttctgccttgtctaatatcttttttttttttcagtagagaaggggtttcaccatgttggccaggctgatcttgaactcctgacctcaagtgatctgcccgcctcagcctcccaaagtgctgagattacaggtgtgagctaccatgtgtggccagtcttgtctaatatcttagaatcccatttcttgatcctttctgtaccattggaaaatgtgacaaatattcctgtattgacaaaagaagaacttctgtgtgttgatacccacattcgaagttccaacgtgttagttcaagtcttaataagcaggcagtgttttgttgtgagttgaagtaaaacacatagtggttttaaatgcagggttgcatgttatcctccttcagtctgatgatcgtgtatagacacaccagaccagagatgggactgtggacccgagttgggagacttgactctggtctgagctctgctaccgtgagcctcctttgtgtcattgggcatgagagaatctctttggcgattacattctgcagtagtggtggcagtggtagctgagattcttggttctttctggcttagagaggagtaggcacttgttatgaaacaagggaagagtctttagtgcccacttttacttttgccgtaaacgggtttttatgccgttaggagaagaacctgaccagagtatgcattcagtattatcattgtctttacttgtgtcttctgcaggtgtgtacagcagctctgaagtgtgtcccacagtggcttctgggtggtgccactggcatgtggtggggaacctctgtggtgaggtggagtgggcgcccactgcccactgttctgtgtgtgccgtgaccaggcgggtgtgcgagggaggaagacaggctagacggccgtgttgcatccacctcctgttctccctttacagagagccagagtactgtttgtaatatgctcagggaaaaacagaggcattttgagctatatttagacaccatcacagaaaagtaaacacagattgcttcccgatatgacagcaactatctacaggccactgtggctgaccccgatccttatcgagcttgtttcacatggctgtgatctgtgtgcatcagtattgaagaaatggcacgttacctgacatgtcttctctatgcccgtgtgtagtccgctgtgttggtgtgttacggccgggccatggattctttacttttgcacagttgggctgttccattttttctcaatgagtaggtgggccctgggctccaggtgctgccatagcccctgtgacctctgagagcctttatagcgctgatgaatttaatgttcataataattgcaaggtgggttttatttctcctttagtgaatgagaaaactaagaaataaggtcacagtgtactcgaggtccctggtgggacagggctgtgaatccattctgaatccagagcccctacttccttgctgggcagtgccattcggtacacagctgcagacgtgaataaacaccccctgccctgtttgagcgagagaaatagaacagatttcaaaagttttctttagttactggtaagagaatgttgtttcccgaacaatggttcaaaagagggaagagttttctatcagctcttgtttaatccacatgtgtagaaatgattttagatcaacaagattcgatagttctttcggtgggttttctttgttgttgtttttttttttttttgtgaagtgtttttccaatttgcggttgaaggaattgggctgaaaaaagtagtaaaatatgatatgcataaagatgtatctaataaactatgttcttaatttgatatttaggagcaaatacaattagatatcttttactataaatgcatgtgtagggatactctgaaagcctgataacagagtatctaaatataaaaaggataaagtatatttaaagtatactaaaagtatataagcaagttgtcctttaacttggatcatcttgaaaaggacagttggattcccagcccagcctctgaaagcctatctgacatgtaatatagctgaattgtgctacccaatatgcttagaagaatctatatacaaacatttcttaaaaatagacaatgtatttcttccttagagagagagagaataactcctacttacatgtacatccaaaagtttactttgaataaggaggaggaaagtcttatcaagtaaaaaaattgcattaaaagccaagtaactaaaaccagactggttaggttaagagctctttgaaaatggtggtgtatatattgtggccttcacagcacttgtcttattttctggaattgaaactcaagctacagcagttgtggaatgccatctagaaatgaaaacatgctcggacaatctatttagagaagttgttgagggctgttttcgatgtggatgataaccctgatagagcataaactttcagtgagaaatgaaaatggtcatacccggatagatgttaaaaaaacataaaattggccaggcgcagcggctcacgcctgtaatcccagcactttgggaggtcgaggcaggcgaatcacttgaggtcaggagttcgagaccagccttgccaacaaggcaaaatcctgtctctacaaaaaatacaaaaataagctgggtgtggtggtatgtgcctgtaatcccagctacttgggaggctgagacatgagaatcacttgaacccgggaggtggaggttgcagtgagctgagattgtgccactgcactccagtctgggtgacagagcgagaccctgtctcagaaaacaaaacaaaacaaaaaacataaaattgcttcaggttagatgtgcgtatgagaagcagcttggcccttttgttttccagaagtcttagatttgatttttttttttttctttgagatggagtcttgctctgtcacccagggtggagtgtgcagtggcacgatcttggctcactgcaacctctgcctcacaggttcaagcagttctcctgcctcagccttctgagtagctgggattacaggtgcccgccaccatgcctggctaattttttgtattttagtggagacaggatttcaccgtgttgctcaggctggtcttgaactcctgagctcaggcaatccacctgcctcagcctcccgaagtgctgggattacaggcgtgagccgccgcacttggccaatttttagtttctttaagggactggtagtgagaagcaggagttgagaccctcagttgtacatttttaatgctcaaaaatagaggacacagcaggatggatttggactgtggatgaatatttaataatagaccataaggagaagttaaaattaaataatttgcactgtatgagtatctgtttttctatctgaagtctcattgaaagatatttgatgcattttgagaggttcagataatctgtgtatttaatgctttcgattttcagaaatctgagggttaagctaacatttttgacatggtgcaaattaactgaattttaagtaggactgtgagagttgatggcagtgatgagacagataatacaaaacaattttagtcactgataagatgaatttgctgcactgttatctatagcattaaaacatagacattccaatcattttcccatttaacatttctgctttaattaaggcagttttggtcgtgcactatttgaagtgaaataagtagacgtttcctgtgccctgggctgtctagattgaatgtgaagataggactgcctcagggccccgtattggaaattcagcctgaaatttgatttactcagcctctccataggtccttcattcacttggctgattttgaaatcaccaactcagccttgattttcatacttccataaaaagttttacctttttcaagaaaatctagaaaataatcacattttatttttatcaggcataaattctaatttaaataattatgagaaaatgaattcttagccctagattttagttttactacaaatatatcaacatacatgtttgtacacttaattatgaaggcggctcaggttatgtaaaatcagtatattgtttgggcaaacaaatgtactgtcgtttaatttctatcatgttaagtccaaacaatgtcttggctggtgaaagtagtaacagtttaaaattgtatcacatggtgaattttgagcagaaaagttgcttgtaggctgtggggcctggggcaaagcaccctctttcctcctgtgtcctccacagagcttcattcaggtgagatgggttcctcctggcacagtcctgtggatcccttgggactgagctcaggtatttcctataggaagcctttgttaaagcccatggcagacccagtgagacaccctcttctcaccttgccttggtgctttgtcccttcaggacatctgctgtgttgcactgtgacctgtttagtctgtctccttcagtgaatctccaggacatggaggctcgttcatccttctgcttccagtgttgggcacaacgcacatagtaggtgcttagtaaatgtgtggtgaatggattcaccaaatctttaaagtgaacaccagagtattgaggaaggcagagaaggggaaggacccgtgcagccttggagtgggagtgccagtggaagagaggactggcagttctcggggtctgtgctcctgccttccatcttcacctcccctccgtccctcctcttccagcctcagccctcacctctgcagcgagactgtccttgccgagcacagcagtggcctccttgtcaagtatagcagaagcctttacccttcacctgactgcattcctgggctgcatttggcacacctgtttcgttgctacacctgactcccttccctcctgtaagagcacactctccagagtgtctacattttctggccattcttccagcttgtctgtgggttcattttcccttttcccttaagcggtgatattctctaggattctgttcgctacccattgttttcctttcatatattcctcctaaataaagttcatgggttttattgcttcctattgattaattcatcaattaatgtgctgggtacactgttcaacttatgccctggagatataatagtgaataaaatagagaaaatccctgccctctgggagtggatgtcctctctgctgacttctctacctatttttccaggtcaggccttactccccaagctgcagctcattatgtctcttccttctgggcattttcacctggatttcatatcagagcctcaagtttcctatgtaaaccactgaaggctcccactcctggggatatggtgattggcttctccctctgcacactccatctcatttggctgctggcttccatcactcatttggtctccaaatcctgccgcatttcccttctaactgtgccttggagctgggcttgcttcctcccaccactgctgccagttcaggacctcagcctcacctgcctgccagggcaacctgacctgcttccagctgggtcaggtgcccaagggagcagtcctgtgttcatctgtcagaggcagcctgagcctgtagaatgccctgcagggctcacccatgttctggcttctgcctgcttcagcatcttcgtaaattcgtgcttcacgtggatccagatggtttttatttcctgatacacaccaggcagttcatctcccttgacccagtgccttgtgctgtttcttctgccctgtggtactgtacatgctgttccctcccaccttggacgtgttattcccctttatcctggtaattctttttttttttttttttttttttgagatggagtctagctctgtctctcaggctggagtggcacaatcttggctcactgcagcctccgcctcctgggttcaagcgattctcctgcctcagcctccggagtagctgggattataggcgtgcactaccatgcccagctgatttttgtatttttagtagagacggggtttcaccatgttggtcaggctggtctcaaattcctgacctcaactgatctgcccgtcttggcctcccaaagtgctgggattacaggcatgagtcaccatgcccggcctctttttttttttttttttcaagagacagggtcccactgtgttacccagactggagtggagtggtgtgatcatagctcactgcagcctcgaactcctggggtcaagtgatcttcttgccttagcctgaacagctcggactataggtgcctgccaccacgcctggctaagtttttaatttgttgtagagacagggtcttgtgatgttgccaggatggtcttgaatttaccctgctaattcttaagccttcctgaaagtccccatgtacttacctcagtgtgaacgcagcatctggcacacagttgggatcagtatgtggttttggaaggacagaggagggaaggaaggagctgctgggtgaatgctgcctgctactgtagcaccgggtgagggcctttctacctattgctttgttcctttgacgtcccaggacatgaagggctgaggctccacgcctagccctcctgtatgacctcggccctgaagcccagggcctgactcaccaaaccaaaaataaaattcaacatctacttgtgaactggttgtgtttggtaagatgctgacttacatggggagaggtgctgtgactcatagtctgagtgctcatccctacacactgctggtctctgaacaaaatctttaccctggacatatgcatgatctaaaatctatcttttcactttttaatgaacactcggttgcactaaggtttgatcaagacttgcagactcagttctaaaataaaatcattgttctaagaatactttgaaggcagaaaatgttaatcactcaataccctctgctcttattactagtaagctaaaaggaggtgggtgagcttaactatcatgctcttttcctgtacgcataatagaattttagatgcaaatgttttctctctgcttatggtccaaaatcgtttttagttttgtttagtctagagctctcttaattgttaaaaactcctaaaagtaaaaaataaaatttcttgtatccatctaggttttttctttaatgtcttgctggatgttttgtcaggtcattgtttttaatatttttaaaacttaaggatagttgtgttattaatgcatatgttgacataacacaaatttgtgcctttgtaataaagaatgaattaataaaccgacttcttttatgtcttcacagggcagcccaatggatccaatggtgatgaagagacctcagttgtatggcatgggcagtaaccctcattctcagcctcagcagagcagtccgtacccaggaggttcctatggccctccaggcccacagcggtatccaattggcatccagggtcggactcccggggccatggccggaatgcagtaccctcagcagcaggtttgtgctggtcccccgacccgctgcttttttgtaatagttttgtctttgccttttgctgtccacctaagattgatgttaaagagaattagggggcattgcacggattttctgctttaatttttattgtttctttaatcacaggtataattttttttttcttttaaagatggaaaggtgagcttcttaaagtggacagaatacctgtttggtagaagggcagcaggaccagctgtatttgataggtgcactgtgtcataaatttgcagcaggttataacagatgtaagctctgaagtgaacttggcattccaacatttttgtcagactgtgtcagattttgagctgtgaatagaccatcttaaggtgaattttcaagtcatttaaaggtcttttccatgaggatggcatcaagtttttaaaattgaaaaaaaaaaagtttagtctcccaaagttattttgctttcatttcttaaattatttcttctgtaccttttgaaaaaggtttctgtatttcatataagaggatttgatgtgcatctgttttgttaggtcttgatgggttttgtgtttttacttaaaaaagacttttcctgttcttaagagacccaacattttccttttttttctctggaatcaaatggagtcaccttagatgaccatttaccctctagcagtggtaaacctagtcttttggatacttgaaagaatacccctttatgctggctggagggaggatgaaatttggaaaagactaaattagattcaaacttgttagggtatttagttactaggagcaccagaaaggcttatttataaatcgccataccgtacctaagccgccagggagtgggtcaggctgatgctgctgcacgttttactgccccaggctggggcgtcccatggtgcggccgtcggtaacccacaacagggcttgacagtgctgtctcaggaaatgcttccatctgaccagacatctttcgttgaggggcaaaaattagatatgactactgttctctctgatgtggatatggagaatgattgatcatactttacatgatacatagctgtatattaacagttcatcagtaggttgcttctgagccttctcgtttatacactattcgatctgtattgtgatttattatttgtttcattattattgttattaatttattattgaagtttattttaattataatattgtgtaagtctatgttatagtagcatggcatggtggcaccctcctgtatttccagctattcgggaggctgaagtgggaggatcgcttgagcccaggagtttgagtccagcctaggcaatgtatcgagaccctaaaaaaaaaagaaataaaataagtcttttatttataaaataagaaataaaatgttgtctttcctctttatctttgctcccacttggatgattttgtttatgttaaggccattattggggaagatagaggtagctcagcctttgaatcctagttgcagattgaacaccctttgctgttgtcagagacctcacttctcaattattgaaggttacccactccgaattctagcagtcagttgcatacttaattgtacttttaattttttccacattattcctttttttccagcaatattttgctgcctagagtagaaatctttagttgtggctgctaattgtgagaaggaaataatttgtaaatgatgaaaagtaaggtggaagagttgcgattttctctccttcattttagttttagagcagcttcaccattagttgagaggaagacagcccaggcagctggctgctcaagtccccatcgcactctgttgctgattttatgtgggagctaatagttgtggatggtgctttggccacaggaagagagcagaggtgggaaggtagtaagaagtagtgggaccggcagagagaagtggatgctcgctgctcttgggctccccactttgcttttcagcatgtttccctgatgtgagattaaaaagtcagtttcaaaagatgctgttcacggcaagcagccggatctccctggtctctgaaggagttaagtctcactagaagttctagatgttggcttagtttccagtcccaaagtgggagtcaaacaaatggagagggtgtgtgaagaatgattacctaggaaatgtttttaattattttcttttctaaatgtgtaaagctaaaagtagaggacatacacagatatatagagtaatctcaattttcttagcttcttccatttatttaatccctgtgactcttatacactttttaaatccaatgactcttagatttatttgaagggacaaattgatgtaggttgcccatcaagtatttcagcaaatttttaattaagattttagattggatattttactgctaaccaaaagaaatacccaattctaattaagcacagatctttctgataatgaaaggaaaatagtatatctggtaagaaattgaatatcctggctgcagaagtgtggaaactttcataatgagttaatcaaagtcatgggtctaaataatctgtattgcctttttaccttttcatttagttaaatacagctttgaaatatagtatcttgttttaaaatttaaaaggctaaaaataacagaatgcacttttgaatgtgtataacattttaaagaagacatacagcttttataataccaaggtcatgtgaacagttcttaatttttgaaatggaaaaaaatagtgaagatttagagcaaaggttattagagcatatacattcattttgttagcttgagtctgtgttctttggggaggaattttcagtgaattgctttgtttctgcattttggataattataaatttgttcacaaacagggtcctggcactgtgattggctgctggtcccatccatcttcccctaggattaatgtaattggctaagcattgttgtagttgtggctaataatgttcttcagggaaaaagttgaaagataattatgacattgagtatttattgagtggacatcaccacctaggcatgactttgctttggatggcttccagaacgttctgtgtttggtttgtgaacctctaatgagctgaatccagttcatttaatattgctcgtatatttctgcacaggattaaaatgcaggaattcaagtttgtaaattgagttgcccacttaccagctgagtggtaagttgtctttggctcaggggtcacagtttgattcctggctggcgttctgctcctgtgatatgaattttaaatgagtattttgttagaaagaactgcagtgctgatgtgaaatttaacatggagaggagtatcactgtttattttttgtctctgagagtctgaaggaactggccactgactgtgtttgattttagtattaccctggtgatctttgatttgtatggtgataattttgtttttgagatatactcgtgactggatctttgaagcatgacgtgataatagtacatcattttagtctttattaactggaactagatttgtggtctttcacttgccagttctcccacatcatcaggcaaatacatggctaaacagattagttttgcacggtgccctaaaaactagtctacttgggtttttgttgagttcaggggggaaatgaattttctatgcctctgtggagaatattctgcctccaggcttctggaattcagacctggggttggttaacagaagtacattggttgatttcatctattagacagctacacagaagaggcataatttttaaggttactagaatctgactctgagtttttcagattaaaaaaaaaacaaaccttaaagacaccaagatattctttgctggatcaggaatgcaggttttgtttcatttttcttatccttcgtgatcataaatgtacacctaggcctttaccaacttgttttaaataagattttaatataaaacggcacccaggagaaatagcttacagaagctgagttatttatttgtgtcaagcagatttcaattatgtagactgagatttttcctgagtttttttttgtaattgggttgatattttaactattcttgcaggtgtttgataatatgatgcctgttggaattataaaacagggcaaaaggaaaaaaagcaaaatgagagattgaagttcatgagtgcttttatgatgggaaaacatgacttttttagtttttaaaggcatacatgtattgcgaagaactttatagcaggaacatagaatatgatcattgttttgaaatagaaaatggcaaaattaaatataaactaattatttttgttaaggtgattcatctgaacttattacttcatattgaagtaaaaacaattcaaaacaggtttccttgaagagggcttgaaaaagatttgtattctaattttgctgcatgttttttgagtaaaatatttatttcagaacataagcattttatttggtaccctcttaacagccaaaacacttcttccaatgcaaatgtttattttggcagcagatgtttctaaaaaggagacaaacattacaattgtttggctaaaataaatgtttcctttggggttattaaggcagccaggcaatttctagggtttccacctgtgttaatttatattgttgatctattctggaaaaaaatgtgtttcttttaaatgtaattaaagccacgttttgatatagtttgcatgagagctctgaaaagtaaggatgaatggggagaggaagactggtttaagacttaaaaattccagagtttttcatcatgaaatgtttattatgattcaatctttgaatcctaaatatgaatccaatagtcagggcttaatttttgttttatttaaaaaagagcctagacttcctatgtttgcgactgtgatggtgtgtccaggatgagaaaggatagataacttgactaagtataatggagaggaatgggtgcctggtgcctgttttacattcagactcttaattttttgagtctctatatttacttaaagatgcccattcatatctgtgtgcacatgtacgctcccacatgtgtgtaaaaaacagaacattcatgtgacaatggcattcttgtgtaatgaaacgtgtatatgtatattaatttatatgttaaacatatttgtagatatacatatataaacacacaaatgaaatgaaggtgaacattttggccagtaaaataatgaaatgctatgaaatttcactatgttgtttacagcattttcatacattcgtgttctgtactgagacttggagccgagctgatttgcttgtacacctgaaatgtttggaggcccttcagcagattgcagatttttataaataatggcctttcgttggccacattttgtcatggtttcctcagttgttcttcagcagtgaacatgaaggtatttaaggtttaccagcaaaatacatttatacctcacatttctgcttccaagtagatagcagatgctactggctgtgatgccaaagctccctgtagatggagttttgtactaagaaaatatttttgggccgggcgcggtggctcacgcctgtaatcccagcacttggggaggctgaggtgggcggatcacgaggtcaggagatagatagagaccatcctgactaacacagtgaaaccttgtctctactaaaaaaatacaaaaaaattagccggcgtggtggcgggcgcctgtagtcccagctcctcgggaagctgaggcaggagtatggtgtgaacccgggaggcggagcttgcagtgagccgagatcttgccactgcactccagcctgggtgacagagggagactctgtcacaaaaaaaaaaaaaaaaagaaaatatttttgaaaagatttgtaaattcctataatacctaactggttttgtgtactttttatattgtatttgggtttaaacatatttgaattgtgacattcttggaatgatatgttagaagagatcatattttaagttaaataaagatttttaaatctttagcctttttccgaaaagtgagagaagatcagattttacctgaaagtttaatgagaaaatgtgagatgatttcattttaatatggaaagctgcttttatattaggatgtttatattgatacatttattttttatctgtacatttacattattctcgattttctaagcttatatacagtatatagcgcctagtactctgctggtagtttatactgttttgtcatgtacacatgagttccactatgtattttacatatagactttcaacctaaaatatctgtaaggttttctattttacttttgagatgtaaatcttaaatgtatgttttatttttattttttagagacaaggtcttgctctgttgcccgggctggagtgcagtggcatgaacatggctcactgcggccttgacctcctgggctcaaacaatcctcccacctcagcctcccaagcagttgggactacagacatgtgccaccatgcccagctaatttttaaatttttttgtagagacgaggtctcaccatgttgcccaggttggtctcgaacaagtgtgtgttttaggtagcactgaatgagtatattttaaataagtgtgatttatttgctttcaccaaagaaacattaagcatggtatttatgttaaaacgttaataattcaaataaaggtaacagtcgacgtcagtaaaatgaaccaaccatatcccttcagcgctccttggaaaacaaacactgaacaacaacggaaatcccacaagataaatggaaagttaaagcgattaagtgacgtatcttagacaagtggttctcaaactttgctgaatgttagagtctcccggggcattaagaaaatccccccacggatgcccaaggatgcccatatcaatgacacctgactgtgaaggccctaatctcccgtgactgccctgtgagtcagggtattagagggaggctacgtgggcaagcgggggcagctcacaccttctggagacttggtagtgatgctggttcttggcccactcggtgaatcagaaactcaccactgacccaaaggaatgaaatgggcccagaaccaggagctgggatggttgagtccttgcctgttaaagtctaatctgtgtgtgatactgggaaaatctggatctcactgtgctcctctgccagatgagggggttggactataagacctctcagcttggatttcccctttaaagtaatattaagtgaatgtcttttcatttcagtattagatttttgtttgtttgtttgacatggggtcctgctgtgtcacccaggatggagtgcagtggcacgatcacggctcactgcagccttgacctcctgggctcaggtgattctctcacctcagcctcctgagtagctgggactacaggtacatgccaccacacccagctaatttttaatatttttgtagagacagggttttgccatgtagcccaggctggttttgaacttcaggactcaagcgatccacttgccttggcctccaaagtgctaggattacaggcatgagccaccatacccagcctcagcattagattttaaagtcttgttatttcagcagtcttgtgaaatgtatgggttgatgcttgacaaattgtattaagataactactgacccacattctttttaaaagagaaagaggtgtttctttcttcttcaaagattagcaaattgttggtatcagtctaataaattattttctaattcttaattttattgttttttaaatgaatgtattctcatgtaagtctttgttctgcaagaacctggtatgtgttagatgtgtagagtgcagtctgtcctttttgataagtagaaaatcttaaggttgacattcttggaatcacaaaaggaagcaaagagagatctagcaattactcatttttaagacattgctactttctaagtagttctgaaaacaagtatatattgaacaacattgggacagattatataaagtgaagtccggatggaaacacgtttcaagatttatgttctgtgcattaccttaactctttaactctcatgaggtaggctagatggctttgtttttgtattttaaaaaggttttttttctaaaggtaaaaagtttttcttttatgttaatagccagccaatagttaaattcttaatggcaaaaaattctttatggcagtttgattatttttacatgtaataaatttattaaagctatttgcccttattataattttgaaaaggaactttaaaagttaaatctgtagttgtgaatgaaattaagaaaactcttaagctgagagggtgcagaggaagaagatgggtgggagcatgtgaggcaagtaggggattataaagaagcagcagctttataatctggctctcctccgcagagccagagagccttgcttaatccaggcttcctcaggcctcgagagcaactctgcagttggactcaagtttagaaatgtttgggacgtcctggatttgagatctgaatgtgggtagtgtgcgtgtataacacaaacatcccttgcctgcttaaatagccccaatccaaaattttggtcactagataaacagcaggagttacccagcttcccaattcttatggagaagtgtgtttaatttagaaagcagaccatattccaaagaatgagccaaattcatctccctttattgatattgacttggtaagagcatgcttattttattttattttattttttttaaataactaccaagcaaaccaaccagtagaattggctcttcagggttagtcaaaggcaaggatccaagtcaagatctataaaacaccaaacattcagaaacaaagtcagactaatgttaatagcaaaaatacgcaggtattagaattaaaatgcaaaaacctgtcattgctgaggtaattaagttttacttaatggtcctgagacatggtataaccagcctcacttggatagttgtagtagctagtcctcaagagagctggagacaaacgtcttttggaagaaagcttcagtctgagatgcaccacagaaaagacagctgtgcagggatggttttccagcctgagctgccaacgatagcgagagcgtacctgaaagcaagggctcttaaaacgctctaagtcaccgaagcctgtcggtgggaatgggaggatgggggagggatagcattaggagaaatacctaatgtaaatgatgagttgatgggtgcagcaaaccaacatggcacatgtatacctatgtaacaaacctgcatgttgtacacaggtaccctagaacttaaagtataataataataataataataataataataaacaaaaaaaaccgctctaagtaaggattagatgtttctttataatcagtatcataatcattgtttccaaagagaactgggaaaaggtaaagcccagaataattattggcctatgggatctgtgacctcagatactctcttaaaagggtcagccaacaaggaggcttccctttttttcaattagtatattaccttgagatttccagtaggatcttcaggcatcccaatagtcattttccagacatcttaaggatttacatctctggaggttctcctcagtgtcctgggcttcatggagaaatagggcctgccttcttttcttcctacttgtgggtcctgtgccattcgttaggggtcatggagatgacaaggtcttactcttcagtaattggccaaaatttgatggttagtgtcttagtttcttttctgttgctgtaaaaaaaatcacagactgggtaatttataaagaaaggaaatttatttcttatagttctgaaggctgagaagttcaaaggcatggtgttggcctctggtgagggccttttgctgcttcacaacgtggtggaaggcatcacagggtgagagggtagtagcgtgctggctcagatctctcttcctcttcttataaagccttgagtcccattgtagggaacctcattctgatgaccttatctaattaattcctgaagtccctacctccagtcaacatatgaatttggagattaaattttcaacacatgaaatttaggggatacattcaaatcactgagcagttggggagaggaggaaagactagaatccccttcagctgccaggaagagctaatctctttctcccctagtgtctctggctgagttctcacccattcttcttcctccttggcgtcaaaataaaaggatgggaagagtgataacttagtcacatcactggcccttagtcttcatggcatctgatgtatcacagcacacttccaggaatggcggttaaggggtgcttcactgcacatacgcagcaggccgtgagagtgataagcacacagtggagagtgagacatgaggctccaggagggattccagctctgaccaggaaatcaccactgctgctgaaagccaccaaggtctggcaaggagcatcatgcagtgtgcttacttccaaatcaaactctgctatgatctaacaaagaatttaagtcacgtgaatgcacgcaggctgcaagagaggctgcgaatttgagttcggatttctaaatttcggaggcagaactttgtggttgttaactctttgtagggaacacagaattgttctcgacagttccaaagtttttcttgtgtagaaatttccctcttcagtgtcgcctcctgtagttttcctgtctcaatacctggtagcttcttccttcccaccgtctgggccacaacccctcctctgtttctcagcctttaaatctttttcttggcttttctcagcctttttcatctgttctgacctttgcgtttccttttcctcctgctgggaagtcttgcagggcttgctatctgagttccttgagacatttctctgacttaagtaaaattgcacactcccactgcctcctgccctgttctgttttctccagctctcttatcccctcctgaacctcacttgtctgatcctcccgttagaacatatggcctaggccggcagggactgttttccacgggtgtggacccatcatctagagccgtacatggcatttcacaaacatttccaaactactaatgaagaagttgccgaatcctagactctggccagtgaaatctgtccagcttgatgcaaaaatgtctgtgtgctttagccgtgttatctgccacccatggttcgctccgagattaggctcattctccaaagctttcatagttttcactagaatcccggtgcccaggtgctctgagaacaaagcctgcagacagctatggggctgtgtttttaatgctgcttttagattcctaaggaagttttgatgcctgagagattgttctagctgagtggttttctgtcttgctgatttcagtgtgtgtcatgtccggggtctgtgtttcttcctctctgattctaaccccattgagtaaattggagatggctgctactctgctctaaggcccattatgtctcagaatgatcccttgcactgggtgtaatacctcggtctggagaaggttgagttggatttggtgtacctgtgatgggagctaggttcttcatcccaacaccagtcattcaacagtgcttactgaagaaagtccccaagtagttaggatgccgtacatacaaaacagatgtttttctgttagggatttgctgctggagggaagagagttctaccacatgtggtggaagaacagggcctggaagatgggctttgagcctctgtagtgagagcacagttcacatccatgtttgtgctgggatcacggaaagggcttttgatggcattttagttctctgtcgctgatcatttggacccagacttgattttcacagtgctttatgggggctgctgccattatgcatacactgcatcgtagcccatttccaaagcagaggtcatggctacggctggaatgagagttgcacctcggagtagaggaatgaaatttaggttgaattcttaaaaatcatccctgtgtgctttattctagttgagaatctttgatagacatataattttgatgatgatgatgacaggaatctagtgccttcatgtaaactgtcaccatcacaattgtctcctctctggacccaatttcttatttgtaaatatgagaagttgcctctggatgacagtaacaataacagcaatctctgtgccaggtcttatgctaagtacttttacatggatgttctcctttaatccctgccatgtttctatttatctccattttatgaatagtaatagtagctcatgtttattgagggcttactctgggtcaggcacttacttgttttgcttgttttatatggattaactcacccagtcctcataacagcctctgagacaggcattgttatatagtcatcctcattttacaaatgaggaggctaaggggaggggttactcaggctgttcaaatttacatgcctactaagtgctataacaagcatttcagttccttagcgcctgaactctgggcgcacgctagcactgttttatgattctggtaaagctggaatccttgtaactgacactggagttcctttgagtttttaaataataagactgattataattaaagtagcctcattttgacattgaatattcgtttcacgtaaagtcttttgtgacctttaacaatttgaaaattgaatgttacctactacgtctatcacacttagaggaatttttttgaggggaaattcacataacataaaattaaccacttaaaaatgtacagttcaataatgtttactgcagtaatagtgttgtacaaccacctcctctgtctagttccaacattttcaccacccccagatgagacccctggattcattacgtagttactctctgttgtccctcttccccccaggcaactgctaacctgccttctaccgctggatttacctgtttttgatgcttcatgtaaatagaatgatataatatgtgaccttttgtgtctggcttttttcagttagcatactgttttcaaggttcatctcttgtggcacgttccagcacttcattcctttctatggcttaataatctgttggatatatgcatcacattttgtttatccattcatccattgatagacatttgggttgtttccaccttttagcaattgtaaatagtgctgttatgaacatttgtgtacaggtatttgtttgaatacttactttcaattattttgagtatatacctaggagtagaattgctggatcatgtggtaattctatatgttaactttttaaggaagtgccaaaccattttccatagtggctgtaccattttacactagaaacaggattttatcattggtctgttatttactgagactcttaagtgccagggaatcttgccaaacccttttcatatatcatttcctataattctcgccaaatccatgaggtaagtaatactactcactttgccagtggggaaacagaggttaggtagcttgcccaagctgatacaaactctaagtagagaattctgcctttctattagatagtagccttaaagatcctccagaccagccttgctgtgtgtgcaacacattccactggtgttaggcaaggtcattttgggtggcacatagacacagcattacataacctggagttctagagtagggtagttgttctctcattggtgttagtacgcggtagcacccttccaacacttcatagtgcctcccaccccatttcctttttctgaagaacaggcctgtgtctataccttgggcagcatcaatatctggttagaatgtaaccattattgtattgtcttcatggtattcattttttctggtaatcttctgtttatgacgagtagtattattttatatatatggtagtatgcaaagttttaaaatacaatttttaaattaaaaagtgtttcactggaaagaaaaacagttcatgctgtaagttaagcttacttactttgagtttaactcagcacatgtattttcaatgtctacagttgttcagtcctgtactagtcatggggaaataccaagacagccgtaactggggctttgctccagaggaccacggcagggacactctgcaaagagatatgctgagtagtgcgcacaggtagggatgtttaccctggggctatggtaacaccgaggggcacacctgggctgggataaggacaggaatgtagggggggtgttaggctgtatatgtgaatccagactgattctaataataatatgtatttactaaattttaaaaattgatattttgcagttagataaatgccattatctcatgtgtccattgctatccatagctattgttttggtcgaataaattgagagaatattattaaggtctttgacagtttgctcacttagttgtcatcagatgtttactggtagccctaagtgggtgaactcaaagtacatcatgggagcagacacgtaccaggtacttggatgcagtgtgaggagtgctgggtcaagatctatggactatactctgggaacacctgaagctgcatggggtggggaataggtgcccctagacctggatcttgctgtaggagtttgctgggtctggggagagaggcatgtgttcttggggagtaggtagagtgtgcttttcaagttcaattagattgtaaaggggtctttgtgaattttacagaatttttcacattttcagtttacacatggttatgagcatagaatcaagctttctccccttcttgcttccaaattttcctttcatctttgttctgctttggtgcttcgatggatcagttcagaaagccacagggctgccgcttacaggctggctggatcttgtttgattttttgttttgttttgtttaagaagagaaactgtttcttcatacttggagcaagcgctcaggcttccagagtgaagaaaattcctactctgtctgtgtatccagagaggatggaagtgcagtatgtctctaaacattgttttgataagtagactttttaaaattggtatatgatttctattaaccttactttcttctgtatcagagtgcatcatgcaattatagcacctctatggcagttaagtttatatataaagaattaacattttgctttgcagtctacattgctggtgacttttgcctttggaaataggaacttgccaaaaatctaaagtaatgttcaggcaatatactcaacactctgagtgtttgttctggtgtgtttaacctggtgaaggatgatagggaaataagtaaagaagtgaagttttgaataaaaactgactgccttgccctgtatttccttttccctctatcatctttccatattataacttttggttaaatcaactttcagtgtttatgttaatgtaactataaaataactgtctgtagttgagtcatggactgcaagtatatttccttactgtacaactttctgttatccaggagttgataactgcccattattttacgttttaagaaatgtatacatcaccagtttatcctcaagctctgatagaacggtgcacttcctctcaagatggtggaacccattagttacttagactctgagtgaacaatttttcatgttcatggatgaccatcatcttttgaatagccttcccgtgtctggggagatgtccacatgtaaaaagctctgtctccgtaatttaggattcggaactcaattcacagcttcttcagccggggatgcattcaggtggcttaagttcttttaattagaccagccatactggacttttatttggaagtaagcactttgcatgttgttctttaaattttgtgtggctttcagcagcagtggtgatctcctggtcagagctggaatccctccgggagccacctgccgcattctgcattctgtactttattaccctcctggcccgctgcgcattcggagtaaagcatcccttaactgccattcttgaaattactttgacctcaaaccctgttttctgaattccatgtcttgtctttatgtaatcctcgttttagtagggttcatcctgtagtagctttgtaggaagggtgcaggagatgtgcgtgtctctgcttgtcagaaaggtggccttaatgggtggattggctgagtgtagaattctagattggatataattttccctcaaaaactgttgttcccccactgtcctctgagcttctagcatgtctgttgagaagtccagggccccttctttggtatgtcactgattgtttttctctctggagactttagaaacttgatctccttgatttctaaaatgtggatgaactttggagttggtattttccatccattttgctagactcattcagtattaaacttggtgctatttttttcttcgttaggggagggtattattcctttgataattaccatatctttatttcatttgttcttactatctatgaaccttattagttgggtgttataagtcctggattaattctttaatttttgaaactttttttctatcctcctttcatctgattgctttttttgttgtagttcctggcagatgtttgttctgtttttgtagtttcactttccatgaacttgttttgttcaccaaatttttcttttttataccatcttactcttatttcgtggctacaatggtttatcttgccgacgacaatgttgggattctttttgaagggctcctctgcagtgttcctggtccatatttcctttcagcccttcacctatacggtctttctggttggaggctattttttttgtttgtttgtttgtttgtttttgagacagagtctcactctgtcacccaggctgcagtacagtggcacaatctccgctcactgcaacctccgcctcctgggttcaagtgattcttctgcctcagcctcctgagtagctgggactacaggtgtgcaccaccacacctggctaatattttttttttttttgtatttttagtggagacggggtttcaccatgttggccaggctggtctcaaactcctgacctcgtgaaccacccgcctcggcctcccaaagtgctgggattacaggctgagccaccgcgcctggccagaggccttcttgaggtgtctggtggtccttcgctttctgcacatctgtaacagccagttctgagaaccgatcggcacgttgtgtgtgtggacggggctgcggtggtggggagaggattgggccatcttgttggcagaccctaacatgctgctatctccccctccccagtaactaactcatcgttgactctcagaggagaagtcagggtgtctggagagctggaggctgactgggggacgggcctgttacgtgttttaactgagtccccgttttccatggactcgcctgctgtggcccctccagatggcaagtcctcttgacttcctacaggacaggtggggattgggaagggggatctctgaattgctccctacagattgtttacccagccccccgccaccctctgattcctgtctttggggttctgcactttaattagcttgcttcttatcctgtcacctagaacagattaaaactttaattatcacttgtctttctgcttttctccttccaaaatttttttgacctttcttatctgttaccatctcacctcatgttttctttgcccttgtggtatttgtttttatttctttactgtcattttaatggggtcccatggaagagtagagagaaacatgagcatttaatctgtctgtttaccagaaacctctgcaaaggcatctttaataagcagtttttttttttaaaccaacctgttttctaataggttttaatactgtgctatctggtaatgtgccagagttttcagtgtctcaaggaattggtagactaagaataaacctaagaataaatgaattaaacagcacaactggagcgtctctggcagggaacctggcctgaggaggccatgtaagggtggggtggcctttgtttagattcgccaggaaaagcttcagggaactcaggaagtgctgctcaggggaaagggtctcccagctgtgtttaggacccagcgaatgggagatctgaagtgggaaggccggccaggctctcccaccatccagaggcaaaatgaggtctgggtctgtagagaacatccccagtgaagggtaagagaggagagtccagctgagatagacgatgggaaggaaagagagttttggaggtttcttgcagatgagagcagatatattttaatgaggatgaagatgatcctagtgttgtaaatgttaaggatatcttgaatgtgtttacatttggtagttattaacacacgtctgcaggtaaacatgatttttctggttatcctttgcctttaggagagaaaaagaggcaagttaagtaaagtattttaaggttatatttagttcgaaaagaaatttctgactgtagacccggctctctgcagatgtggcttgctctccaggagtcacagaacccaactcgacctcctccctggaagcccaccagagaatccaataaataaaacagtcagagcaagggtgttgtaattgagaccccacctacctggccttccccttgccctgtcactggacaggtgatactaagcattcatatttagaatcgtgatggagactttgccagtcttcagtcctcaaggaaagatgcagtggtgctcatttaaggcagaaaatataactaatgtctgtgtttcagtgtaatttttaacaataaagaatgaaacgggaagaaatttccgattaatacttatgaacccagaaaatgaagttagtcattgtagcataatccttagctcctcagccttcagttgtactgttgctgtatttgagctttattgaagagaacagcttcacagtatctgtatgtgtggcccagtgccaagaccagtgtgaaactaaaaacaacaacagcaaactgttagagtaattataacaaaagtcaagtctgtagccttatgtgtcaggaataaagaataagagttcagtttatttggccagtgtttggtgttcacattgctgtttatgtaactctacatatggtctttcaaagtgatcgtgcacttccaaaatgaagtatctacccacttttatcagctttcccaaatgttatcttttaatgtcttcatcacgattagaacacccattagtaattaggataactcaggaaaaggatcttccatgtggaccaccatcctggctggaggttgttattcttctctgtgcatttttggtgccctggatttggcctgatcctcaggcccctttaagttaaaaatacccggtgtgtggtctgccagctggcccaaggccaggctttttatagccttgtctggcctgggaatggagcttagcatgaggggaggtgccggggggccttctctggcttggtagaccagaagtgtggggaggccctgctgcctcgctaagtcttagctctgtcatcataaataaaagacgagtcatctgatggcagtccctttcttctctgatatcttttggtaaaatatttgttacaataaccaaggagacaactttgagtaaatttcccattatttttgaagcctgttgccccttctgccagggagaaacttcaccgcctgggtccatatactttcactaattaactgagcaccaggttcctggagaaacatatttattaaatgtcaaaaatttggggacatttagtcttcatttttggtcttctgtgtccagtggcatttttcctaaattatgtccagcatttccttgagattatgtatgctattttttattctaaattgttgcctcgattcttctgaaggtactcatgtgttaccagggttcttccctctcctcccctgggagtacttagaaaaccatttttgtctcccttccttcatgccctcttccctggaagagttttatatactaaatcatagggttaaagtaataaatgccattgataccttgctttgttttgttattaaacattggtaaggaatttggtaaagtgagggataatgttacagaattgtcattacaaataattttcaggctataccccacagtcagccaacatgtgggacccgctgctaagacttaaaatattaaatagcagaatgttaattaattcatagagagaagcatctgcatttacgtagtctaaaagagtcaaaatttaaacacctctttgtgtaaatcgttacagtctttgcatgtttttctgtcccagagagcagacaatcacattcattttctccttcttttcttgttcattactagatggaaggggcaaaagaagaaaaagacaaatatttgggtgcttttctgtgctggggaggatagcttttttggttttcttttgtttttaaagcccttaaggaccgtagttggtaagccaattgtcacagtttgggtggaccctaaggaggggaagccgtgtcattggccctgacactgattattgaaggacaattgttcactttctctctcggattaaaaatgcatgaaagcacctttttgacaccgggctttctgaaacccagtgctgtctttttttgtaatactcctgtggatgtttttgcacaaagtggcacctgttagagctggaagtgttcttgcacggctgtctttgatctagtagccctggacaactttaagcacatagttactagatgcaggcccgcccagccccgggagagcatatctggcttgcacgtatttaaggtgatgtgcagaagagaactggaccaattgacaggctgcactgtacacaattactgtgtttcccatttgaattatcacttcatttctgaaaatggaaaagatgggacggaatgataggaagttttgagaatgctacaatatatgattaaattggagactctttttgactggacaatatgaatctgtatttttattattgcattttgggtgattttggacgccagtattcttatttaggattgaattctcacatgaaattgtgtaaatatttttctttttgaggacctatttctaaaattaagcggcttttttgaatttgtattttgaattcctaattttgtaggctatgccacttttaagacataagtgcctaaaaggatgaaaagtaatagaaagtagaatggggaagtggaaacactggaatcaccccttgcactgaacgcatagtaatttttaatgatcacagagtggctcttcgttgtaattagtgtaatttctcaaacaagcatttaatgtataggcagtttaagcatttttttctttctgaaaatatgttagactaatattctttcagaatttcttctgggaagaaagaattgtctatttaaattttactaaggttaccttttgaagaccactaacctggttgaagcagttaaacttgctatccgttctttgaaaccacattgagtgagaaaattaaaaaggaaaatggcttaaatattttccccttgacaggagaaatgataagtatttactgtaaagtgtccagataatgtaaaggaatatgaaagacacaaaaattcccccatcatctttccactcacagataacaagtggttgtatgaagggaacgaggtgcttcattaatctttgaaccttgcgtatttgtcccgtatttattaacagcattgggcagtgtttttgaatgttctgtgtggttatattatttattaccgtgggggaatgagccaggtctggctctttgaacactgctaatttacatgaagaaaatgtccccaaggaggagacttaactagggaaagactcagttaccttggcctctctctgtgtgtgccagagcccccctgcaagcactaggggctgcttctagaaaggggacccagatcttaagacttcgaggaggaagataccctatttgttctccaagaccattcagtcgtgaagggttcaacttgttccgggttatttatttagcattctctattttctgctttgcttttgacactccaatgtttaattgtatatttaggaaataacaatgaagagtacgtttttaaaaagaagaatgttttctggaagggatttccccccacttttggacagtgagttagactccttctgaagcctctggatctaggttattacagggtttgtcttcttgaagctggaactgtccaactgttgtgctatttcagacctggcctgtctttcactttcaagctccagaaataatttatagctgtagggtgtcaggagtgggtttgaactgggcctgcccaacgtaacatggaattgtgcacagattgttaaaattactatttctgcattcaaatgactaagtacagtaaactttttactggcacagttaatttatttgaatatttattggtcgagtgcttcacgtagaagactaacataatgaaaaagcccagcacatactcagagctgatttggctttttaaaagattctaggcttgaatatagctagctaaatggtctttagcaaattgactggcagtaaattgatcctgtggactgtggcttgaatcagcctctcattctttaaaggtattatggagatattgttatctcagcgcaaggctggtctagaaaagggatgctttcagtacaaatacttgttacttacatatttccttcctaactgggtaaagttatatttctattctttacctctcgcaagagcatatagggacttcgaatcagaatattttgttcaattgtaatagccttcacaaatttagtttgtttctgtgtttaagtctcttttgacttaaaaaaaaaaatttgaggccgggcgcagtggctcacacctgtaatcctagcacactgggaggccgaggtgggaggattgcctgaggccagaagtttgagaccagcctgggcagcataacgaaacctccctgtacagaaaaaatttttaaaattagcagggcgtggtgatgtgcacctgtagtctcaagcttgagcggttgaagtgggaggaccctttgagctcaggagtttgaggttacagtgagctgtgatgaggcaactgcactccagcctgggcaacagagcaagaagactctgtttccctgtctcttaaaaaaaaaaaaaaattaagagccagtgatttggaccttcattaattcagtgttttcattgacttactcatatgactattccaaccagaaggatgtaatttttccccctctgagcccccaattttaccattagcagatgtttttccaaaactaaccacaaggaagcatgtcaagactaactcagaggattatacagaggattaaactatgatttaattacaacagtgggctctctggctctattaatagctaatgacttgtattatattttcccgtgcctgtgaactctatgctattttagacctttcagatattagcgaccccagctacagctatcttacttactctgaaagtaggagcctctcgtttcatgtttagttttgttttataacttaatatttcttcctccttcacttaattgggagagcaaaaggtttactaaacaaacaggtttgaaaacccaaagcttccctcatgtcttggtgagcttgctgtgaagtggagtagcctgttataatgctgatagggataatggctggaagctttgtgcttccttaaggaatgtgctacatgcatcatttgcacatacagtgatcggtttgactggtggaattactaagaccatggtatagggtggtactttaaaatcttacagtgcttaaggactggattaggaattaggacttaagaattctaggtttaactctgtgctttaaatcttacttaacacattgggattatagtacttaagtatgcctgtattgaaatgtgttgtgagactagatgaaagtctatgtaaaaatgaatttgaaatatttggatatattctttaaaacaatcttattgtgtgtttttattcagagccctagagttgtcctgaggatgagtattttcccaccgcgggcatgaaaatggatcctaatggtagacccagtcctctagggtggtcagtttgaggcccaagcttcctttccagggaggcagtggcttaacctgggtcaccctgtaggagcagtagctggaggctgcaggacaggtgcttttttctcctcccacgtgtgctttttgtggtggaagagggggcaaggtgtagaaatgtctgactctgattcctccatctgccagcacagcttctcttgttctctgtggtctcacctttatggcacagtactctttcctatttgtctttgagctctgaggctcagccctaacctcgaagagatggcttctgcatctgtcagatgggtctcatagtattacctgcctccatacgttttgtttttagttttgttttaagataaggccttgttctgttgcccggactggagtacagtggcacgaccacggctcactgcagcctaggactcctgtgttcaagtgatcctcccacctcagcctcctgaggagctgggaccacaggcatgtaccaccatgctggctaatttcattttttgtggagatggggtctcactatgttgcccagtctggtctcgaactcctgggctccagtgatcccccactttggcttctcacagtgctgggattacaggtatgagccacactgtgcccagccctccataaatttttgtgaggttaaatgaggtgatacttgtaaataatttaatgttttcactcactaaaaaacaaactttttttggtgagaacgttatgaatgttttcataaaacatgtcgttcttcagggagttgtgaattgtgacattaacaatttccttttatcaaccaaagctagctactagtacctgttcctaccccctcctctttctgtttttctggcagggggcactaaggaacgaacggaattgccagggtgagctggaatgagcttgaaaggctgttttccttggttttgagtgattattgacttgtacttggggactttctgtggaattcagaaaattaaggtttcttatgacccataacctgaggcagttcaggaagccctttggggctgtgaagcaggggtaggggcttgtcctggagcagagcacggaagattcaggtgtctgcttggttcctccaggctctgggatgttaagcttattaaatagcctctctagacccagggaacatgttgggtcagctttcaaaattgacaaaattgtctcaggactgaggaagtgtggcctgttccacagtgcttacagcctgctgctgtaaaccgtcgcggtgtgcccccgcacccatcccggccatcctgccacgcggaattgtgtccacctctagataccagctaacactgtgctatttgcttgttgtgtttgaatatatagggcacagatgaaacagtgaaagatttaggaaggttttattgagagttcatttcttttgcaaaaatgttacagcacattaactgctgtaattaccataaataattaaaacaaaaatatgatcataagaataaatgaacaaaatgtgttaagttgtaacatgggcctctgttgattgttctggcctgtttacttccagtcaattactaggcagtttttgtccacttgggctgtttgataaggcttttgtgataaactatgagttcggggcagttggggttgggatgggtgcttatcatatatcatagaaggcatttcatgaagcataaaattcaaattgtaataatgtcactagtgtctaagttaacacgaagagatgaatgaacataggtcagagagatggggaatgatgtccacttttggaagagcaagtttgtaatactattatctaagttattcttaagaattagtaatagatttttaaggcgtatggatgatattatacatttaaagcccattagcgagcacattgttttttgattttcgaaagtttgggaattagtcagaatttacactgagagtagacttcagctacaaaaatattgtgtgcaagtgtaccttctgcacagggttccggtgtgtctgaggaaggcgtgtgctaacacagacgcgtgggatgctgacccacaaaacactgcaggcccgtccactttgtgtgtttcacgtggcggcagactacacgcttacctttattttcagtttcttttctgacaaaatatcacatatttcagtcagtgtttctgataaagtttgtaaaataatcattttataattatattaagatgaaatactaacaagctaaacaataagttagctatatgaaaactggttaaaataatgaaaccttaagttcatcaaagcagttcatcattttgaatggagccctaaattgtgtgtgtgtttctctgtctttgtgtgtgtgagtgtgcgtgcatgtgagtatctttttaaatgccacaactagagatgggaatatggaattcagtgatttacattggagaaattagctctggaatctaggaaccagatggctactcttagaggatcctcagggatgctatcatacttttatgaaaaagacaattgttgaaataccagtatgagaataaagattatagtggtttgttctctgttatcaaaattttcaggaaaaatgtggttatgtagcctacaattttcacgtattataattataactcttcgtgtggactggttgtagatggagggaagacagcaggctctggagactttctggacccctgcttctttgtagggttgttatgaggacaacatgtgttcctagatattgaggtcttagagcagtgcctggagtgaggtaaacaacataaactgatgtaggttgcctaacgttaactggagcgaacttactgcaggtgccatgtggaaagatgtgtgtatgtttcagcaaatacgttccactataccaatgcctagaaccatgtatgtgtgtgtgtatgtggtgaccatatagcctatgcttttcaggatgcattgaatgataacaacataaacacttaaaacctcccactgtgtgccatgtgctggtttttggcattttatgtacattaactcatcaacttcttaggaattctaagatgtatgtcctattaactcattttacagatgataaaactaaggcatggagagattaagtaacttccccaagtatttctagtggagaagccggggttgcatccagactctgaccttaaccactgctccatgctgcctccctgcatcaagcactgtgtcttattataaaaacacttgtgtatccacatgtgtgtgtctgtatatggcagagcccatttaatacatcctgtgtgtgtgggcatgcatatcctctctctctctctctctctctctctctcacacacacacacacacacacacacacacacacacacacacaaactgatgttggctttctaaaatgcttaagcctagtaaatctcaatgctgaaaaacccattcagtcatattttgttgaaactgtgacaaaatataaggggaagaaatttgggggaaaaactagaaaagtaatacatatctaaactggaccgttgggagcttgacgtgctggcaatctaagggtaggatgggctatctgacctcactcattcaccccaaggctggaagggtccagaagggcttgcagttggatttatgggagccgcatggaggagctgggattcaggaaaatttacatgtttgcttgaactgttaaccacaactagaacatcagtgtagtaagatttgtctgtttactgggtgcttttacatcagtaatctcctttgaacctcataatagttctcttaaatgacaccaaaagtattaccattttccagacgaggaaattgaggcttaggttaagtgacattcctaaagttacacagttttgaagtgtcaaaagctgaactttggttttctgataacaaaacaatattctttgattctgtcacccgcaatttcaagagagtgtcagtgccctggtcccctgctttgtggaggctgtacagagcccctgggaagctgaggtgccaggcatacccactgagaatgcaaggacaggtggctgttagaagcagaggccctggtgtgtccttggcctgggggctaacttctagtatggggtttcaagaagccctcttgctcaagtgtgaaggagggctttgttctgaagcttctatttgaattggaaactcagggtgttgttgagctaggaagggggctgaagagccatgaccaaggtgctggccacctactctggaactactttgattttttgtttcagtttggcttaaggaaacaaagaggcaaatagtgttctgttcctaactggtatagtagtcagttttgcattggaaatatacagtcatgttgcttaacaacagagatatgttccgagaaatgtgtcatcagacagtgtagtcattgtgtgaacaccatagagtgtactcacacaaacctagatggtatagcctgctgcacacctaggctatataacagagcctgatgctcctaggctgcaaacctgtgctgcatgtgactgtattgaatactctaggcaactggaacacagtggcaagtgtttgtgcgtcaacatattgaaacatagaaaagatacagtaaaaatacaacttaggtgtccatcagtgggatgaatggataaagaaaatgtggtacacagacagtagaatgttattcagccatagtagagaatgaaatcctgtcatttcgaacaacgtggatgaaactggaggacattatgttacgtgtaataagtcaggcacagagagacaaataatgcatgttctccctcatagatgggagctaaaaaaaaaaagtgaactcatggagctggatagaatgatgattaacagaggctggaaagtgtagtggagagatgggaggggggataaagaggggatggttaataggtacaagtatactgttagaaggaataagatgtagtgtttgatagcacagtagggcaactatagttaacaataatgtaatttcaaaatcactgaaagattggaactggaatgttcctaacacaaagaaatgacaaatgtttgaggtgatggatatattaattaccctgatttgatgattacacattgtatgcttgtatcaaaagatcacaagaggctgggctcggcagctcacacctgtaattctagcactttgggaggccacggtggtcagatcacttgaggtcaggagttcaagacgatcctggccaacatggtgaaaccctgcctctactaaaaagtatacaaaaattagccaggtgtggtggcgtgtgcctgtagttccagctactcaggaggctgaggcaggagaatcgcttggacccagaaggtggtggctggagtgagccaagatcccaccattgcactccagcctgggtaacacagtaagactctgtctcaaaacaaaaacaaaaacaaaaaacaaaccacacataccccatgaatatgtacaactgttacggattcataataattaaaagttaaaaaaaccgtaaaaatggttcacctgtgtagggcacttaactgtgcatggagcttgcaggactggaagttgcgctgagcgagtcagtgagtgagtagagggtgaatgtgaaggcctagggcattactgtacactactgtagacattatcaaccctatacacttagggtacactagattaattttttaaatgattatgctacaatatgatggtgattaccatgtcactgtttgataggaatttttcagtaattgtatgggaccactcttttttattttttgagacagagtcttgcctgtcgcccaggctggagtgcagtggccgcaatttcagctcactgcaacctccgcctcccgggttcacgccattttcctgcctcagcctcccaagtagctggggctacaggtgcccgccaccacgtgtatgggaccaccgttgtatatgtggtccatcatagaccgaaacactgttatgtggtacatgactgtaaatgaatcagaattgtctgatgattccttttctgtcatcccttacactactggtgccagtgccattaggatggctgcccatcgcctgagttttggccataaaggaatggagagcagggagagttcgccttcccttaagagttggcattttttgtttggtgccttacttgatgtttagattttagttctttaaaaaaaaaaattctagtgtttacaggtgtgctgtagtgcacctgtgtaaaggaaacttaaagttgaattattttataatttatacaccagccttttatacagagcaatgcttatggcagcttctctctctgtgttaactggtattaaagcttttctagattaaaagccgtaggttgcaaaacatggttttttgcatgtgcagttatttctttaccactgagttgtccttccaagcctggtctaaatgtgcttgaaaatcaccatctgctccctgcagtttggagagggcacagaaagactaaggtgaaaagctgtcacttctaatgttttcattcagactttcacacccttcttgtctagttacataattgtatgcagcaggagttgtttcaaccatttggtcttgtccttattttgagagagagagagagattaattttaagagagttgggtcacagtactgaggcagatttgagaatctgataaaccatgaaagtgttcagaatggaatcttcctgctcagtcagtttgttagtggataagtccattgcataaatgacatgaatatgaacaaaagcacctatacttatgcatatatctccctttgcagaatatgctttaaattttgcagaatatgcttacaaatttttaatgccgtatgcttagattttactttttgaagtcagtatagcacagagttgatgatataatagtgctttacaattttatttgatgttcagaatttattatagataatatagaggaaggattttgaattgttcacataacttattttttcagtgtcttcttttttttttttcttaaaaattgatctattttggttttgattggaatgaatggccacaataggatttgaaaatgaaacaggacagaagcctgttagtgtaaactggcaataatttctaatagtcaggaacaagaagaccattaaatcgtgggatttatgccattgaaaaggtagtaagataaaataagaatattactatactctagaactgtaaattttgatctttctgcgagttaattatctaacatccataccaagctggagacaatagctgactctttcatttacttggaggtgattgtaggagaagaaaaggatttcagtcttcagttggcaaaatgatggttctaacttgcatgtaatggaatctttagtatacccacaaaagattatttcattaagatgttaataatagatttttgaggaacagcgttttatacttttcataattaggacatagaacttaaaacagaaattcttttttttccccctctacttcttttctagcttgagaaaatctggatctctttagaaaaagcctttggtctatttaagcactctgtttgtgccagagttacttgcttttttgtgcaaccaacattttagaatttctctaatgacacaaaaacttggtttggaaaaagatacacattccaggccctcagagaacaatagcagagccacgtagtaggtctgtcagccaccttgtacactgtggtcgttagtagagccgagacggagaggtactggttgtatgaaaggtagacagaggagcctttgcaggaaggataggtgacatttgaaggtgccagtgaaggaacaacaggactctgtgtgtttggtggtggggaggggggacaggcatgttcttgacaggggaaacagtttatccattgctttataatcctagactggcatggtgtgctgacgaagagtaacctggagaatgtgatagaagtctgggttaagaaactagaccaggccaggcgtggtggttcatgcctctaatcctagcactttgggaggctgatgccggtgaattgctggacacaggatttcgaggaattcgagagcagcctgggcaacatggcaaaaccctgtctctacaaaaaatacaaaaaaattagccaggcatggtggtgctagcctgtggtctcagctactcgggaggctgaggtaggaggattgcctgaaccctggaggcggaggttgcagtgagctgtgattgtactactgcactcaagcctgggtttcagagtgagaccctgtctcaaaaaataaaaaaataaaaaattaataaataaataagaaaccagaccagagacaggttgtgaatgtgaatggtcttatacaccttcccacggaacctgaactttatcatgctgaaatgggagccctttctctttgcttacaaagctttaataaggaggcagctatgaagtctgtactctagaaggctcattgctggtggtatggaaagtgggctagacagggagcctgaaaggaaggtgagtgacaagggagtgaccctgtagaccttgagatgtgcagaagcagtggggccaaaagggaggtaggactgacccaaagggcatttgtgagtttgaagtcaggcaaaggagggtttctgagatgattttccagtgtgcagcgtgggcatccaagtaggtgtcagtatagagttcaaggaatccaggaggaacaggtctaagggaagacagtgacgttgcttttgaacataatttgatttatggtaggtgtcttgaggaaacagaaatgttcagtggacagctggaaatatgggtcaggggagttgtggatggtgaagagagacatttgaggtttgggtctacagttactgtgtggctcagtggttctgttctgggctttccattggaattggttggggagccttaacaaatagccgtggtgtgccccatcctcagattttactacagttggcctggcgcgggcccttggccctgtgtaagcagggctgagaatcacaattgtaggcctacagtggaagccacaggaagggatgagtgttgttcaaggagagggctgagcacaccttggcaccccagcacttaaggggggtatatggcgaaagagggcacagtgagaaagtaagacgaaggcagaacagtaagagaaaaaaaccagaaaagagctctgtcataaaatggatggatgtgggccattccaaaggaggatgcagtggccagcaccgccatgcactacagaaggtcagggagaaataaggattaagaaatggccagagagccttcctgcagtgattgatggtacaaggcaaagcggagtggtgtaaggagtgaatgaggaaaggaggaggcggtagatgtggacggctctttgggactgcatgtcttgttgtgtgggagccaggagtgcttctctgttaatgaaggcctaccctgtgcccgcttgggggctgggccctggcagcggaaagtcatgtctagatcactcttcctgctcatgaagagacagggaaatagtgaatgacagaacagatgatgagctgagtttcataagatgaataacagtcatttaaaaacaaaaggcaggtgggtagaaagaacagcagaggaggtggagggtggcgtcagtgccttgacggaatatgggcctgcgccttagttgcacgtgagatgatcctggagacagtgccgggtcatggaggatgtgaagattaagttgggaagtttgacttgaccctgtacttcctctccacttctaagaatgcctgaaattagcatgttaggtcactttttaacctgctgcttgtggggataagaaggatttaaagggaaggaacctggaaaccacctgttctgagtctaggcacacaaagaccagaataagatgggacctcagcagattagtatagtggtgggtaatagagatgagaaggaaaggggtggctttaaatctatttagaggactaacgaggcaggacagggaagttgattgcattagggcaagaaggtgtgggatgggtgagcaggagacttggatgactctggattctcaaggttggatggaagagaagaatatggatctctcagccaagagcctgagcatagaaaaagaggccagttttaaagatgatgatgataagtttggttttggatatactgattttgaaatgattgtattggttgtggatacttgaggaaagtagagagtagtttgtatttcttttttcctttaagaatcttaaaacaacatatatatcaaactctcctgtgaaacacaggagagttgtatctctattttatagatggggaacctgaagaaattaaaatgctgactttccaaaagtatgaaataggaagtggaacccaggttagtgaatactccagttctgtgtcttgattaattgagcaattgccaaaactgtgtttttcagctgttggttggatgaaagatgaattcttccctgtatgatgctgcacacagcttctgggcattttggatgggtgctgggcctctttgagtccttggcaaaatccatgtgcaaaattggatgtgtggagtgtggagagggaaggagagattccgttacttcttgggcctcactagttcgaacattccgtttccagacttgcaataccatcatctcaaaattgttctttgaaataactaaacaataattttcaacctataacagatgatttgttttgtatccttttttttcttcaagtagaaaatggaaaaattatgtctgtagaacacagtagactggaaatgacttgtgagaactagttttatattttcttaaaactaatcttctccctcatagcaaagccttatgtacttaaagtaattgaatggactgcagggtatactgggaattgtagttttccacttctttgtattctgaagattaataatcttgcagccctctgagtgggataaggagaggatgctctctgacaaattgttatcttgtctttcagaggtgtgcttcgggcagtgagtataccttccatgtctcccctgggctcttggcttgattctaagtaatggtaatatataggatggctttaaaattgtttttggcttatgatattttactttccactagctatctgtaatcttttcttttagcctagtttttaaaaagttgttatttgtatcaaggttatatgtgtaaatggtttacagagtccatgcttgtgtaagctgtgctgtcagtaacagtaggtactgcccgccttagcccatgcccacgtccccagaggcgtccactttcaacccttgtagctgctctttgaggataccttcatgtctagaatcacattcttacattgctccttgaagttttaggctttgtctgttgctgtccccgctggaagatgatgatttagtactcccttctcacttggccctcaccacaagcatgaccctttatcctctctcatcctcctagtgtagacttgccggaattgtggtttgatcagtctggtatttacattatgaagggtggggaaacactattcagaaatgagccatgtcataaactgttgttttccttttctacacagctctttgtttttcgtaaataattttttttaaattttctatataaacttaccatgcactcccctttagaatctcaatcggttataactgtctgtctctccttgtaagatgtttagatccatcagttatgtcatcagttttatcttctagaggacttcctatcctagagatttctggcttgctccagtctctctggattcactttctgctgatgttcaactattaccctgggattttcctttacttggagtttcccttcactttcttgtgttggatctttggtttcctggattctgtgtctttcttgttttggtggagccaatccttcagtagctttcttaagaatggttcaagagaccaaatttttaagatctcacatgtctgaaaatgtctttaaaataaaagacattttaccctcatgcatgacttatagattgagaatggaattctggaaatcactttccttcacaattctgaagcacttgctcaactgtcttaaccaccagtcttgctgttgtgaagtttgaagccattcttgcttcttgtttcctaatcctttgcatgtgactctcttccctcagcccctaatgttgtaggaccttcttttggtctttagttttgtctcagtccattttagttcatttccccacgtactctggctcaattatggaaaagctcttaagttttttttatctccctgttctccttcatttttactcttctctctttctagaactcatcatctcatactagacttttaactttatctcttcttctatttttcatgtcttttcctttttgttccattttctagaaaagtttttcatttcaattatatttctaatttccaggagctctttctgttcctctaagactgcttccctccttccctccttccctccaccttcctcctttttccttttcttaattcttttttgttttgttgtaaaagactcctgttcttatttgagggtagattattttttcttacctctttgagatactgattgtactctgttttgcatagtttccttgtcgtctaacttgcccttttctgtttgttttggtccctatttttatgttaaagtctttccccaagtaattattggttgcctggccagttgttcatcataagaactactgtggggaccttggtgggctccttagggaaatctgggacattcccactcccatcctggctgtatttagacctttcttattggtccagcctcaggtttaccacagaaagaggtctgttggcaaggttgattgtgctgggggattctgtggatactgctgtggtacttctgcagcagtggttctgaggagcccctcttttgctcttctacgaggaggaaatctctgggcatctgccagggtgaaggaggagctgtgcttagtgggagagtgagtgcttcttagtcaccccatctaccgccacactatactcggaggtgtctgctgccaccaatcgccgagcctttggatggttctgccttgtcagctgggtgtcggacttaacctttccaggttgggtaagttagttactatttgtccatctgtttctagcttccaaaatttttggctgtttttgttcctcttcttgtgggtttgttttataaaaataaacaaaaagcaggcaagcaaaaagcaaacagtactgccatttttattactagatgtgagtgctgaatctgctgtctttatccagagtctctttaggttaaaaatatgtgagtcataaaatgaaaacagtttggtttcgtttacatttgtgggtctgactgctgttgtgtgctactttataaatacctttgtaatttatgttaatatgttcatggctgtgggttactgtctgtctaatacataaacagaattgtcacagacattaaaatgtaattaacagctacaagaactgtctacacgagttcttttgaatggtttatactacttggaaacgttgaaaaactcagttgattttgcaagcatcatggaagttacttcgtttaagtgtgatttagtgcattttattttctgtacagacataggaaagttacttgtgaccacagtttttccctgtacatgaatagctccctttaacatggcctggcacagtgctggcttattataatgctatttgtgtattttccttggagtcttctgtgacctgtctttcagccatccattgcatactctgacagacggttttcatctttgacaaccaacaagaggtgtacacatgacatatctggacctactaaagggtagcaaaggaaatcatattgctggatgttaaaatcaaagttttaaagtggcttgaggctcctccatggaaaagatggtgcaaacaccataggcagttaggtactggcggcagtcctgtgctgggagccctggccagagctgtgtggatggcagcaataagaaccctcactgctgaggacataggaagagccaggctgagtgccggaatccatttccttgggcataaactgagctgggagaaagggatgtttcctcccacaaataatgtgagaggcatgataagtacactgtttcctgtggaaagctgacctagtgattgtattttattgggatatttgatcctttatttgaatgtttttaaaagtatctgggtggtgtcattattaggaataccacctgattaattttttttttcatttggttacatttgaacggtatgtgaatgtactattttgaagttttaaaataactttgaagatacttttggtttcctttaggcctgcttttcaggttaagaataagacagagaatatacttctggtgtgacttttaaaaaatgtcattttaccttagaagtggtccgacagatctcaagctgctcttcacatgccctgccctttaaatctcaggctgttcattggagttcaaaatacagctcctctaccgatcaaataagctttctttaaaaaggcaggtggagaaaacaaatgtttgtttcagaaataattttaatgtccgaaacgagttgctgtattcacgtcagttatgcaccttgtcattgagcatggctgctgcagttccaaactgtcccagtgccttcctgtccctagcgctcttcctcacagtggggattgatggatgggtcatttccatcctacctttctatgaggaaagccttgtagcaggctgccaggtgaatgcttgcctcagtaccgagctgtgcacaaacgtctgattcattattttggatcagttttccacgtggtctttattttgtatttgttgaactatttaggtaaagtgtgaattataaaagaagctcaatcattcttcttcctccctggaaagagaattgaggaattggtgtttccttggttgtcatcactgatatatgtgggtgcttctattgtattgttatcacatgaggataaatattaaggatttaaacctcctgtgataaagaaatggctttagaagacagaaatgctgaaagggtttatcttagtctgttcaggctgctataacaaaaataccataaactgggtggcttataaaaagcagaaatgtatttctcacagtttttgaggctggaagtttgggatcaagatgcttggcagattgagtgtctggcgagggcctgtttcctggttccgggactgtgccattgggctgtgtcctcctatggtggaagggggtggccagctgactgttcttcctaagggcttcagtaccattcatgagggctgtgccctcatgacctagtcacctcccgaaggccccaccttttaatgccatcacctggagggtttagatttcaacatatgaattttggagggacacaaatgttcagaccatagcagatttaagacaatacaaaacaaaacaataggtattcttgtgaaactacttagaactgttttaaatgttttttagaaataggatttagagacaatttttgtcaatttttaataacacttaacggtactttgttttgctaatgtgaaagaagaattcagcaagatcattacaatataaaagaagtgacagaccaagtacgaatagggtttatttgggtatgtaattttaagtgagtgaaggaagaggcatttgatgatttgtaaaacatttctgatttaaaaaaaaatgaatttgttttttttgcctctaaagcgttaaattttcttggtcatcagttgaaacttttgatttcattttaattgctatattgtatgtgcattgtctgtatatttcttcaaaggaatttaaagatttggaagtctgttaccaagtgtgtgtcagaagaggccaaattttcagatttaatacttttagctgttttttctaatgacacttctttcgaagacgagattaacaaattttttttgtctctctgtcataggtcatcgtgttttttggtatagttcattcatcttctgttgcctcaacatctggccataaaagcgaataatgaatggttttttgaatttgaaatttgcatgtgaatttttggatgagagacatttttatataatttataagtaaccattggggactacatctgcctcataaatattagcaaaatttcacactgagattaatgagcttataagttgttagtctgcatatatttgatttgcctgaaaatagggttttcaggaagtctcagtgacctatattaactactttttataagggcgaggacatggaaagactttattttatcatgcttttcttcacccttttagtagacttgcaggcatgcaagtggaagctacaggaattaatacggatgtcagaaaatatgtgaagagatggatttgtctagagtgagctataaagtgaatttcttcatatcaaattttatatgcccattgagattcttaaggaaaaaaaagagtgagcattcctgtagggaaaaatcggttctgagagcaagtagtaaaatcacacttaacaacttcagacatctgttgaaaatatgtctttaaaaatatttaaaatatcatttccaataatgttctaatcctcatagtagcaggagagagcatttgataattgaggcattactgatctccctgagtgagttccctacacaccagggagcagtggctggggcagggtgggggcggggagggcaagcagttgagaggctgttctctgcctttgccagggagtagccattccgatggtccggtttgttcaggacttgctctcttccttccagttctagctccgaaacaccctggattacagtctttgaagaagtaggagagccggtggccgaagtgcccactcatgacctggccttgctagtggaggtggcaaccagagaagctggagagcgcctcctgatccacagggaacttcagtaaatccttttgcctccccccggtcgtcagattgcgttcatactgtggtagcaggccccgtctgaggcccatcctggtgttgagaggctggatgctagcagggagctccaggagacgttccgctggctgtttataaccagatcctgaacacaaagcttccagcctggtgctagaggccagggagacctgaaaatgtctcacttcagggcttagggtaacatggaataaatatatttgccattgaacaaattatttaggttaaattgccttcgttgtcttttctgtatctatagtttaaaagatttcctatgccttgggagctgcggattgaagagcttgctttgaatgaagtcttgtcaaatactgagtctgtgtggtaacttagacctggtgggaaaatgtggattctggatttcctgtgaaaatagaagtacttgaaaagcaatgcttaaaatggtagtgttaaaaaaaaaaaaagtcacatatatccagctaagagttgctaattctgtcgtattgcacattatagatatgtttacatttttaaaaagctgtgtgacattggactctagactcagaactagaatattttaccaaacctctttgttattttgcagtaatatttagtaatgattctgtatccaaaaatgtcctaataacatctaacaaaccatgttcctaaagtctgtgcatgttttgtatttgggatttttatcattttcaaatatctagaacgtttggatttcctagcattatgcctaaaagagattagtatttatgtcagtaagttccgtaactagaatctgagtgattttttttgccttgtcattaatctgaggaggtttgaaactaagactgctgtcatcgtttctcctttcttgtacagcctatcttgctacggtttcttacatataccatagaagcaacaggccagcctgtggtgtagaaaagtgagatttttggagggcagggatactgtagcttacttatcttttacatttatcacctcctagctagtacagtgcctggcatccagtaggtgatggacaaataaatggaaggcagtcatggaatgctaagtgcaccccatggaatgttcttgttcacttatgctatgggcagtctgaaaaacggtgctagacagagtggaaatcagatcccatggataacccttttgcacatttgatagggagtggtggagaaggcctgatacagatggggacctgaggttttcttggagtgattaagttgctcaaggtcacctaattaataagccacagggccaagatgggaatcctggactgactccaacactgttgctcctaattactgttttatcctacttttaggactctggagatgccacatggaaagaaacattctggttggcaagtatcttcttacatgctcttacttgctccaagtctttgggacagcatatgacagtgggggcagctggcacatctgtgttgttcccctcctgcaggaacaggggcttcttagatgggaggctgagggcccatccctgtgcaggtgcatgtcctgcttgatgataccaggtccttccagggcctcctgggactgggctcattgtaagttacaagagcattcacttctggttttccttcttgaggaaccacattgtgcttttttcctggtggcttatgtatacttaattgaagacttgtttttctctttctgtttttctccatgttcttagatttaaaaaatagtaaatgagttaatgaatgaatatgtgcatatatgatattgtacgctgacatattgttgggaagttggaatagagtctgtgtagaataaaataaaatagactggatttaagcaacagccgcttctcaaggcgagtgatcctgagcaagttacttaaatcgtctgaactacaatttcttttttattaaacaagaattgggattagtcgatgagatttcatgtgtaaaagcaggttgcctaggacctggcacttagtgctcaataaatctccttcctccatttcatctgtttttggaatcatacctggtcagtttaatccattgtttttgtttgtttgttttttgagaaggagttttgctgtttttgcccaggctggagtgcaatggtgcgatcttggctcactgcgagctccgtctcccaggttcaagtgattctcctgcctcagcctgtcgagtagctaggattacaggcgcgcaccaccacgcccagttaattttgtatttttagtagagatggggtttcgtcatgttggccaggctggtgttgaactcctgacctcaggtgatccgcgcgcctcagcctcccaaagtgctgagccacctcccaaggtgcgagccaccactcctggcctaacccatcggttttcagtctgtttggtttattggcttgctaagctttctttaataatttctattcagtaggacagagccttccagggaccagaaaaaggggaaataggtatctgagaaataacaaggtctcttcagcacccttttccaactgctgcccccacgctgtggagtggatgttgttcgtgagcctgctggcgtggtcattggtcatccttccacataggttgtttcttggtgctttgttttcctccatgctgtttttcccctggaacccctgcccatcggcccatccgtattttatgctggacactcccctcctgctctgaggctactccgtgtgctgaagacccctctactcttccttccatcttgtgccagccattcttaccagaactgtcggacagcgaggcagtgaccacctgaacaggccatttcatgtttctttctttcccttccagcctacaagcacgccagcagccccgtgcatggcttctcatgtctgctcctggcaccttgcatgatgcctgacagataaacagaaggctcttagagaatacgggttgaagaaaaggggaatgggcacaaattttcatatcatatttaattacataaattaatcacaggttagtttatgtaattatgtgattaatgattggaaagttctggattagcccactggatagaattttctgtcacaataattgtgttcaactgaagattctgacatttcataagttcaaagtgaataatttttatcatactttgaggagagggtaactaatactagtcttttattactttaaacttaaagcatatttagtcacaaatatttttgtaaactttgtaaaaattagtggtcaatttttgaaggagagaactggtgatttacaggataagtggaaatctgaataaatattactgaagatctggaatctacaaatgatctgcgttgatgcagttgtgtttctatggttggctgcgtgcagagctgtgatacacagtgtgaattattcagcaaatgcaatggagtcttgtgcagcagagctttactgcagtacctgtgtgctttgcagattctccttcacttacgtgggtttgccttcttgtctcctgaaggatggcccggtcttccccacctgtggacagtctcaggcattggtaacttcaggcgtctgatgagtggcgtcctttagaaggctctctcctggatctgtgcccccagcccaacctgtctctcagctgcgggccagccttgtcagcacccgccaaagcatttctcagatacccacggcctcctcagaaacagctcttcctccatctgctttgcccacatcttctcttaatggaaccatagtatcctcaggcctgtggtggcagtgccaaagagtcatattggattttgcccttttttcctgtactgactaatttcttatgtttaggttttttgtttgtttgttttattttgtttaaacagggtctcactctgtcaccaggctggagtgtagtgtttcacggctcactgcagcctcaacctcctgggctcattcctgcctcagcctttcaggtagctgggacaatagatgtgcgccaccacacctggctaatttttaaatttttggtagagacaggatctacctgtgttacccaggctgctgtcaaactcctggtaggctcaagctatccagccacttcagcctctcaaagtgctgggattacaggtgtgagccactgcgctcagccatttagtttgttttaatatcctggagtaggggccctgactctcctgattccccttctcactgactatcagctgtatgctgtgggaatctctcacctgtagagtgaagttggtaagagtgagttcaacaccaaggctcaaggcctggcatgcatggtgtttgttacacatttcccccaaactaaaaatcagcaggtgcatctgcagtccccttttcagtgtggcctctcttttgcatgggtcctctctgtgctggctccaggcccgtccctttctgactatgtccttcattcctcttacacaaaccccgccttcttaaataggtcccacattttcatggtgccattatttgtgacttggaagtcctgatctctttccctgtatctctgtctggtacaaccctggctactcctcaaaactccattccattctccttcgtggagctttaatccatttccagaacgtgcgtagtgccttaagcgtatctctttatggtcgtggcatattgaatcttgacttatggtaattggaatatgggtcctttgctcctttaaggcccttaagagcaggagccacatctggattttatcgctgtggcacaaagtggaatagcccacccatagtaactgatcaggtaaatatttgactttagttaacatataggatctacttttacttgctaaattttacagtattctttgaaagaccatctctaaatggcctatttgagtatatagattaagagtagtgtctagatatatatttgaggctgatggccattcatttattcattgttcccgcattccttcactaaacgagcactacaccatcacactgccatatgttgtgtagcaggaactcagtgtatggaaggaaagtcattctttagcttcataggaaatggttgtggttgtgcattgcatgatcaactttcagagctttacaaatcactcatttgagtaccataagctttcttcatatctgcatccattttccagtccagttagtgacatctatattttcttccttaaaaatgtatggaacactttgccatttattcaaaattaattgcatttgtaatggtcaatgttaaaagccaggtgaggtgagaaagttttcattgaccagctgtattcgattctggattaatgtttttgattatttttatttcacactctagattttagcatgagactgatagaaccttaaaattatcacagtctttctccctgccagcttctcctcacaaaataaagatgcgagtctctgttcagatttaaacagttcatgccttttcagtgagctgctgtttaaaatgagttcctcaggaaagaagtggcaaagaaagctgcgcgtattaagtatgttttctttgtcttaataaaaggatggcttactgccgtgttgtgctgttgtttaatattatagaggttttactgcaactctcttggtgattacaagagggctacgttttggctaacaaatgtagtaaatgtgatgaaaatcccctgtgttgtacatttctttgaataacatgtttatataacgtgctaaatacttctgttaaagaactgctttcctgaaattgcaaattccattccagattttagtgttactgaagtgtactgttgaatattccaaattatatgggtatttttaaagcatctttaaaatttgtctgcatacactgtcctttttgaagttgggtctctgaaaaaatttagagttgtatctctggatgatagtgttgactttcccgtggtacctaccaggcactgaacagaattatttaaagaaatttgccaaagctttatattttggagtagatagcactgatgtgactgtgtgaataaatcacatgcacagattaataagtttgtattaatgtttgtaagatgatattgtggtggtgttctcagtgaactgtgggcctctttcctcagcctcacccatccggccctgtggattttaggttgagtcctgggtttgccttgtggacttgggcctcgatatctgtgtaggctcagctgtctcgtcctggttccagtggctctaccctggaccacggcccactcagcccgagactcactgctgatgccggctgggcatgtccacctgggggcgcctccagcatcccagttccgagtatactcatggtgtttcttttccccagtccaccgtttgcccccataaaaacatggcactgctcaatctcttaagttgcccgcctgggaagttattatccttggtgtttttccctcactaccctcctccacttgatcactaattcctgaagactgtcccagacactttctgtgtgccccgtcttcatagcctttacccaagttgaggctgttgccgtcactggcgtgggcagttgctttagcccctcaaccagtgtatctgccagttatcgccctcctacttccagatcattctcactctgaggtccacagacccctgagtgttcacagatggacctcaggatgctgcgaatcctttggaattaaatattaattttttttgttgttgttgtttgtttgtttttgagatggagtcttgctttgttgccaggctggagtgcagtggcgtgatctcggctcactgcaacctctgcctcgcaggttcaagcgattctcctgcctcagcctcccggaaattaaatattaagatttctatatatgtgtgtagatgcatttttctggccaatatactctcaaaggttctatgaatcccgaatgtttagcaaccacttattatttattctttcacaaagagctttcacagtaatcttgttaaaataaaatgaaaatctgatatgttattctcctgcttaaagttctttagtgaatatctgttgtgaaataaaatccaaacttgtgagtctgatggcatgacccttctggactcctgtcttcctgttcacccctattgctctcagctctccagcctggatctaagcaccactttactgagatgcttgcagttcgagattgcatggtgctgtgtttcactctgcactgtgctgtactgttgcctgtggacccgcactccttcccctctcctgtttccttcaggtgtctctttctccgtgcttcttccttgcctgctggctccacctacatttattcaacgtctacttcaataacgtgtctccctatattaaaattacctgtagctattgaatgtgtcccctgctgaacttgtgaccctcatgagtattttcagagtctggcacataaggtctcaatgaatgctaaaagaaggaacacattggagctgccggcctctgaaagttgggtccatgccacctgtaggccttcttgcataaccatatttatcctttttttttttttttaagtgagacagagtctcgctctgtcacccaggctgaagtgcagtggtgccatcttggctcactgcaacctctgctgctcgggttcaagcacttctcgtgccccagcctcctgagtatctgggactacaggcgtgtgcctccatacctagctaatttttttttttgtatttttagtagagacacggttttgccatgttggccaggctggtctcgaactcctgaccacaagtaatccacctgcctcagcctcccaaagtgttgggattacaggcgtgaaccaccgcgtctggcccatgtttatccttgacttttgattagttacgtaagatcttttgaagggcttctctcactctacatacttgatcaggcggttgcccttcctcatgcctctgccagctgggcgtcacgttctgccttctgtttttgctttgtggtgccacacattttgaggctctcctttagtttctccacttatctggctaccatttcaaggtaccattttaccttgtgtcagcgaggattcttaggtgtaagcgatgaagaccgagtctagccaattcaagcagaaaaggaattgacaggctgttgggaagctcacagaattgccagaagggcaggaacaagggagaccacaccatgaggatgctgcaaaaacaggtcacaagtacagagaagacctgagcatgccagacacaacttgtacctccatatcgccccactggcatcctggtggcagacacatgtgcacacacctgaaattgggtattgctgtgtgtactgcaaggagaagttcctcctctccttgtttctttgtattactggctaatgagtcaaagaccagggcatgtgcatctgattggctgggtcaataatctagctgcctgtaactccagttactctagtttctagtttgggaaagcaagtaagtgtttggcctttccagcctctcttttgggaagtggagtctgcctcctatcaggctcataataaggtgaggagttacccaaatcccagaagagggttcatagcttgggcagccaaatggttggacaggtggtcgctacattgctgctttaatgcttgcaattgcactgggcttgctttaggaagtgtttgttggtaagagaattgtcatcatcatgggtttgtttgcatcgtgattgaccatttaggaagtgtttttgcatcagcatttcattgagtgaggtggaggaagtattgtagtgccattttgtaaggaggaggtaaggaaactgctggacaaagaggtaaagcagtctgatgtaggtaggacagttagctgttgagggcggaactacagcttctgactccagtgcccatggaggctctcctccgcaccagcctatcccggctgtgccctgtgcattgctgcaaggggccagggaggagtgttcgcatcatacccacgcactcggagcctcttccaaaggactgagatgtgtactagggtatctggttctgcgagggctaatttggcattttgtattcttgttctgtctacttgtgttgtttaatgttgaacatctctctggttgactgaagccatatgtcattcaaatggaacctgtgctttggcgttggcctgacaatcactcagctgtggagtacagcaataaaaattaggaaaactgtatctgttcattagaccagtggaatttacaatcacttttgtggctgtgccccacagctctacactctggcaaatgagagtatcgtaaattaagcctttgcccttttttccctctgtgaattgcatatttgtttcacactcgcaaattgctgtagaagccagatagatgagcactttaaaagattacaacaatggaaaatgtgttttgggaatgaagtgcctcaaaacaagtactgtaagaggtattctttttcatataatgctaaacacttctgcaaacccttaagaattttattttagaagtatcgggtagcttttctgttacaggaagcagagggtttatatcattgtttttgtaaagtcaactcttgctgggagttaagatataaacatatgacacatgtgtatatatgtgcagcgtgcgcatatgtgtgtgtgtaagcttagccttcctgtgttttagactagtgatctttcacatacagcaggaaagctaagagtcaactcattcatgatattgggagaaaagcaaagcaaaaactgcaacaaaatctcaaaccctttctgcagcagcagatggcaaacagtgatcagaggagaaggacccttccagcattagaagatttccaaaggctgttccagtaggggctgtgggcttctgggagcccagatgccccctgatggtatatttgagttgtgaggtggaggccaggtggcaagagactgcaggccaatgtcaatgaaaagcctgggaggaaaaagagatttctgggagagggagacatcttagtgtgagcaaatgaccagtcgtttagtagagcgggtcaaaggaaaagaaggatgtgataagagagagaagggaggagctagaaaatggaatgctggtagtgaaaggagagagaaagaaaaatagcgagaatgtttcatgattgtgttagaggcaaaagcttactacaaggcatttctaagatagtagataagatgatgtagtgtttaaagtgtcaaacttaaggctctttatagagtaggaaacagttatttagatttattgtgtaagttttgcataagacaaatgcacatcagccaggcacagtggctcacgcctgtaatcccagcactttgggaggccgaggctggcagattagctgaggtcaaggagttcgagaacagcctggacaacatggcgaaaccccgtctctactaaaaatacaaagattagctgggcgtggtggcgcatgcctgtaatcccagctacttgggaggctgaggcaagagtttcagttgaaccccgggaggcggaggtttcagtgagccaagatcgtgcaactgcactccagcctgggccacggagcgagactctgtctcaaaaaaaaaaaaaaaaaaaaaaaaaaagaaaagaaaagaaaaacacacattgatggcttttggtggatgttagttattaagcttttagtatttttaaaaatccttgttagttttgtatagcgaacagaaattttaaattgaaaactgcatagtcattttttcgtgtttcttgtgtaatccatgttctcagactagcataatttataagcacttttgtggctgtaaagtagagaaaaaggctaaagagaagggtttagaattctgtactggtcttgttagcttgatagtagaggttagaagggtatttaaaatgcactgacagtgacagcgtgttgcctggggcctgcaggagtttcgagagagccctgccaggtgagttggctcaagttaggtcttctccttctccctgggtggggcctgcatggctgggaacagcctctctgggagccactcttggaacctgagaaagctgatttctgttaattacggctcactcaggcagtcacaatttggtactaggagagccagaagttgcttttctggacccaaatagggtttagtatatggtatttgaaattttagatgtaccagatttgaaattctggcatgttgtatttgaagaaattgcataatttctactagtttttgttttcaaagctttggaaaatagactcctgcttatactgttttaaaaatatatgtatgtatacaatgtatgcacacatctatgtatatatatagtgtcacatgtaatacctttaggttctctctaaatgtctgcacaaatggcatattgtcttcggttttgcatcattccttctcagagcctgaggactgcacgggttcccatacctcaatactgggctactttcaacacctgtggttggaattttagtctttagtgatacatactggtggatctccagtgttcctgtccccattgtggggaagtagttatagcaataattccaaatggtagatattccttaaaaattgcctcacggtttggggctacagtattcgatttggggtggcggcaagtttaacttcctccccatggcttatttgggttaataaggcgaagatgtgttcttgactaatgtgaggaggcatcctgaaggctagtgtagcattgggggaagccctaatgcttaagtatgcacagttgatatttgagaactagaactcatttacttgggtagtaacatacatacttctgctttaaaataaaatgtactaatttatttcagagtcaagcaatcatacagccagtatttttttaagcatctgctgtatgcctagcatggccctgggaattaataaaattctgccccatcactgctcatcctgtcctgaatgattcctctttcacttgtgtgtgcctttcttccccagctgggttgcagctgttcaacagatcttactctcgtttctcttctctgctagttgaaagggagtcctccctctcagccttggtcccggtggagcagcaattcccatgttctgggacccatttccgcccagctcctcgggcagagttggccagcctgcctctctgctgtgcttctttgatgccactcagaatctccctgtttgcccatgggctccctctcttctgctaggggctgtttctgttcagagattctgtcttattcatatttgtaccatctacagggcctgggatgattctgtggacacctaatcattgcacaataaagtatcagtcaacacatgtgaataatggaaaatatagaggtgtttgaaatccatttgggaaaacaaagcgtagctacagataccaactataagggtgccttgccttgcctttttctttcattgctgtggtctctttcaatcaggagaccagaaatatagcacggttcccatcacacactggccacatactcttagacatttttctgtgaaaggatactgattctatactttttcgtaggattgttatggaggtaaatgagatcgtctgtgtgaaaatagtttaaaacgtttaaaagtgctttgtataacgtcttgctattgtcgtgagtgctagttttgggtgagggaaggtgatatcagtgacaacattttataatgaggtctgttcggtagttattttgtaaatcattttgtagtacacagagctgattagctttatactgtatttttgtggctaggggcttttatgttgaggcctcaggatagagaacaaagtaaggttatgataaaatcttacacggggaacccgaaaagagggagagttcgctgtcttaatttctgcattttctaagggtagagcctgaattaacgcaactgccttaggtttcttctggcctccctgggagttatagtcaaggagtgtttgtgaggcgcctttaggctccccataccgacagcatcttacttcggggctctctccctgcatcaaatcttcctcgtcagcttgcagattctcaattatatgttaaccgtctttattcttggtagcattattgtaaatttggggtagtagttataatttcttctaattgtttctcccagagctattgtttgcctaatattcatataaacctggcaaagagttcattgctagggggattcccaagttactccagggacttggtgatctgagagctcccacagttggggtcctccactctggacaaatagattgccttgtcttcgtgacaatttacttttcttctttggggatctgtgtggaaagttaaaataagtcatagcccttcctctccttgcttttctttacttttctgagctttacttccttctcctctggacgtgctgcctctgaacgccatgtcttccatgctttcctctccagcgtgagcctgacacacatcagccccagcactcggcccacgctccccacagcatgatctcactctccgatcctcacctcgggactgtcacctcgtctcactccagccccatctcttcacctttccttgctttgactcttgacttcttctgagagttgccggctcctctgagtggcaggtgctggaggtgctggaggtaagctgttacctgttctgctggtgtttgccttcctcctgtgcaggtgtttcctgttaacctgccctggcagttcagcctactcagaccagcagtaagttctctttctctggcaatggcattttgtatcaacaacagctgtaggtcagggaagaggcatttcaggagccagaatcgcgggaccctcatttattctgataaagtatcacttggaactgttttctttgagattctctgggaaaaaaaatatcgtgccctaatgcagtgttttctaaactgctgattatgactcattaatgggagcaagaaagtaatgtattagactgcaactagaaatgtttttaatggaaggaatttgatgtaaatagtagaagatacaaatgtagcacatacagcaagtgtcctctgtgttcaaggttttgacataaaatatgtttcttcctccgagttggcgtcaaaacatttgacagccattactctaattaactttcagtattttttaagctcctttgattcccctctccctttttccttctaatgataatttaagaattttttttttttttgtagttcagataaagtagatttagaacatggtctattttcaggacaacctgatgaaaaactgaaaccatagctaagtgatttgccagttgcacggcaggtcttctctatttcatgcaggtctttgcctcctaagcagtgcgccttcccagtaaagctccagcagataagggtaaggtggccacctggagggccttctgtagatgggcgttccatctgggaggattaggaggtgtaaggatggagtgcccaaactccagcagttggtttttcctggatgctgtgtgtgggctaatcatagtccgctaaggaggtggctgccatgtttctaggattattaggctaccactagtttggggagtgaagagcaatggaaaaaggttctgagattcaggaaccaccgaatgcccagatactagtgttgctaattcttttttctggcagtaagaaatagctgtaggttttaaatgattgtgagtgattattgaatgtagtagccctggtcagaaaatattatcatttccccccagttccttataccttgtcttgagctcggggaagtccttccggactacagtgttgctgctgggataaagtttcattgttcttgtaagaaacatttttgaaaggaaactaaatatgtcaaatgaatagttggaaatcgtgtttccctatgacatatacagtgtatcttttaaatttaaaggatttattaaagtgaaaatcattgtaggatactgtttgaaacctggctttaccttctaatggtaatatagctaaaataaagtaaaattggaatatgatctaatttcagaactaaaatattttagcccagttatccttatatgtcactggattttggagggttctgtcttaagacaggtatttgtaccagttaatgtccaaaacagtgaaatgcattcactgaagtctattgacttaatttcagaggtgcttagaatggacaatcagaatacatccatgttgaagtattggtttgaggtgggtaagtatcattttatgattatttattgagtttcaaaatgtatagtttagaatgcctaattttaatgatttgtaaatataaaatgaggaggcaatggaaagaagtgagacatttattttgctgaaaattctaccttcagtaagtcctcctccctttcccctgcctgcccttgggtgtctttctgttactgattttaaaatgtcaacatcctatatttttttctgaccaatcttttgggtctacttggtacatgttccacctgatgaaattttaaaagttgcagattgttcttctcaagggaaataactgaattattttctttttgtatgaacatttactttgaaatatgttgatatttcaagtactttgatactttatccaaagcatcacttcttcatattgccacaactttaaaatggagttcctgtttcttgcccagtatcacaagtttatcatgtaagttaagattatgtgctaaacgactcacaacgaagcctccccttcccacttgtgcctagaacttacagtgtctgtgttggtagaaattttgtatcctaatattgtacaggttgagtatccctcatctgaaaatccaaaattagaaatgtgccaaaatcctaaactttttttgagtactgatgtgatgctcagaggagatgcttattggagcatccaagattttggatttttgggttagggatgctcaaccagcaattatgtaatgcagatatctcaaagtttgaaaaagcttgaaatccaagacacttctgatcccaagcatttcagataagggacattctacccatactttctaaattaatctcaactacacagattttacaattttagtgttgctgttattgtttgtttgttttgaattttgttcttgtcgcccaggctggagtgcaatggtgtgatctcagctcactgcaacctccgcctcctgggtttaagcgattctcttgcctcagcctctggagtagctgggattccaggcacctgccaccatgcctggctaacaattttagtttttaaaacttaaagaaatgtgtgtgcatttctcatttacaggcttccttcctctattcagcttcttttcccacccctgctggctctcttgtatcctctgggctccccatgccttaccccgtactgctctcctgggacacagcatgacctccaaagtgtccttgcctctcttgtcccagtctgagtggctgttcgcttcctccacctttcacttccgtttaatgactgagcctcgtgggagagtggagtgagcacttccgtttgtgactactgggtgaaattatgcaggtttcctagcccttgaccgtaacaaggacagagttgaaccagtggccattcaaagtcttttccagttccggaagtgtatgataaagtagttcttaataatgtgtaactgtgccgagccttccaaggaggaagggaatggatacatattttttcatttaaaacaatagctcattgatccagcaatatgtggactgtgtactggatatatttttgagcatctcctcttcccttccctttacaccaactcaaactatgatccagggaacaagctgcaaggagttagtttttgaaccactgataatgcttttgtgttccactgaccctacctttgtacatggaattcaggggaggaatcattgctttgtgaaatggtgggctggtggtagcagcatcttcgaatgtagaaagatttatttatttataaacccactcctcatttgttatgagaacattctgaaactcaggaaggcgacagaagactcatgctcatttgaagcctgtcctgtcctaggtaatagggacaaaacccccagcctcttcactgtctgtgtcagtgtgcagcctcctctcgggagagcagtgggtgccagtaacgtaccaatgctggctcttcccacgggactgtctgttcatggattctgcagttgacacgattcccaaagtctcagaggaagaaatttaagagccaagttgggtcttggacagtctgtggagaagttggacccttgcatgattaccattgctattacttttctccattgctatgtttttcaccatatacatcatttaaatttaggggtagatagattaatgagtacattttctccctgaaaagtatcttcatggaacacttagactgtatctttttaaaggatgatgctttaaattaatgcagtttttgaaattttcatttttgatgggcttggcattttcttctgttttcatcagcttagttacaaaaatcattttgaggagggccagaagagaaaaaggatataggaaggctgtggagcacccaccctcctgcaccctcagagagtgggcttttgactcgtggtaacaatgcaaccgcataatctcacctcacccccaattctttcatttgaaaaaaaaagaagaaacaatttcaaaggctgtatttaaaacctacacacgaatgagtaatttatatgcatttatcatgcaagtatacgatccccagggtggaaagtggcctgcagtgaatggtctcgctcctcctgttcccctacaaggctccccttccaaattggaagataccagttgcttgtctttttgttgactcttttaaaattctagtcctcttctggtaaatcctattttctgtaccctgtccccaccccatagttatctcaaagagaacagtcttttcaatcaagcattcactgcacatgtcccagtcatgcggttacaaagttgacattgcagcctcagcaaaggttatctctttaaaattttctgaaattcccctttggcacattcattttggcagctgggtttatataggaaagtggtaaagctcttggctcctctttttgtgctttataaaaatagaaatctctggccagaagggcagataagcaagaagctcctctgtaattcccatcacttctgcttcccgagtgttttctgttttacactgtagtaaatggtgtcctcaccatgtgcttgtggaccaagtgggtggtttttagaaacacgaacatactgtagcctgacacttattttaaagtcttattagaaaaccctgctgttctaacatgtgtgtgaagtactgttagactgtgttgacttttgattttgtaatccttttgcattaaaaacaatggaaaatctcaaagatgacattcacgaattcaaaattaccagttacagtctgggcaataatataacaagaaagagggaaaatccaaattgctttgtagtgagatgtactcattactaaataaatgataccacgagtgtgcttttcctgggacagcatttttgggatggaaacaaccaaatccccgtgaggcaaggcagctcaggcctttttattttctaggaaagtgttgcttctgtgagcagaattgacccgttcgttactatagattacctcctgagcccttcatttctttccacgtatcctatgaccttcacaggaatagagttttacgaagtcatgttgatgcatttccatagttatgagtctcgcatttaaaaatgactgtatatttggtatggaaaatacttattttttaattttgttttaaatgcaaatattgataccctaggtgtcaaagcttccacattaaaagtgagtgtggctctttttactgttaaaaattttttcctgttttatattattatatcaataaggcacacaaacttataggtgagtttttcactgctgtgacagtttaggaaagaccacattttaaaatgccagctctgttttcttcaagaataggcagtatgaattatttaactcttaggcaaccctcctaccataccaagtttatatacactggaaatatgctattttttaagctattttagaataagatttgtcatcccttgtattaaacaaatgctcttctctcagaagctgcggattttttcctgttgttcttctattttgtcaaaaaacacactgtagactttatagatctgtggtatcgaatactctcgattggatcctcaggaagaaagtgttttaaagtgtgtaattagggcacttgagcataaaactacaattatacacttgcgtgttaattttgtgtacagtaagactttagttcaacactggttgtaaatgagaggaagcatttgactgccagtgaatgcctgcattttatgaatacttgaataaaatctcctctaattggctgacctggaaagaaaggtgaaaacatctgtagttcagtgggagaggagaatacaaaatgtgtactagagatttccttttccaggtacctcgaaaagtgatctcactcttgtgtacagccgtgtttgctgtgccttcgggatcgtttgtgctattctagctgctgtttcacaataaaggcgaacagggtgaaagcagtttagataggcaaaggaaaagaatcaagggacagactggcatggacagtagttggcaaggaatttttgatatggttaaaaaaaaggctttgggctgatataattgacttgcgttggttgactatacatttgttaatcaaattctgtgtacaagagttaggcaacactccttgaagcctgaaggagttaattttatgaaaactaaaggatgtaccagtttgcaaagtggataataatgtgggagagcttgttaccctaaagagatagcctggactggaaatataaattaatttaagaagtgtataaataaattcatggataatagattcataatggttattaagaggaaataaaggctgttcaggacatatccctgacttctggaaattgaggtcatgagaggcactaccatttagttcccacagctatatagaatattcactccgcagaacattggtctgacctactattcacttcagctgtgatttgctaaatatagagtagttgaacttagaataagcagtgaaattttgtaggcaattaataattgtaaagaaatccaagagggattgtatgtgtatgtctttataatcttatatcgtgtgtacccttctaagttttataaaaaatttgtcacgaaaaagacttgttactgataaaaaatgagaacttttcaatgtttcccaaatcaaaaaaggtaaatctattttatcctatgattttttttaaatttctaagctaatggggagggttaaattatcccagatgtgttggtttcagaaagcctgttaaaaactggcaatgtttatggcccagaagttacctgttaggaaggaaccagggcccaggccagaacatactggacttcagagcaatgtgagagccatggacccagcttgtgggtgtgggtggtcagctagcccattctgcagtgtgggacactgcctgacccttttgtatactttgccaacttctttctcatcccgggtcatctttttcctgttagtcaagagaagccagatagaattggagggaacttagctttagtatacagtgcatacagtaagtgctcaatatacatttgttgactatttctcatttttcaagggtgaaaggtgaatttcaggaaattgtggagtttttgttgttgttgttgttgtttgttttttccttagacaaacctaagaacaagatttatttttcttcttaaaataagaaagaggggaggaaaaggcacctaagctgtttaggagtctcatttgggaacttagcttaagggactgtggaatgttgagcagttgtaagatcttgaccttgtaaactttatttattaccttctagcacattatttttgactggacatgttgacataataaaatttccttgtgcaattggttcaaccacgcatcagcttagcatctgaatttcttgctgtggggaattttcagtctgtctcttatgcatgaaaaatggtgtttgatcttcctgtgaaatcaggagccagcaggatttgccacatgtgaatggagctgttgtggacttaagatttttcttctgctttttgctttcccattttgtagaatttacctggaggggttcaaatctgtgatgaaaaacaaacacataaaaattaaggagctttcttctgtttaagataaattgttatactttttgataactcttagacagcagcagtaaataatcctaaataaatttcattttgttctagattcatgaaaaacagagttggtttaaggagtgattttggtatatattctttgaggctgttaattctttatacctataccacaaacagattctcacattcaaaaataacattatactacatatggttttgtagcctgctatctttaaacctcaactcagtaatatatggacagaactttttgttattaaatatagtgtaaaatgaggattgttatttttaatggctctatagtattttattgaatcctcacctctgctcttttttttccccccctcaaaccagttccctgttgatggacatttaaacatttaggctgtttccctatttttgagtggagcagcaatgaactccttgctacacatatctttgcatacttgtttcataccttttctttttcttttctgtttttttttttttttgagacggagtctcacactttcccccgggctggagtacaatggcgcaatttcggctcactgcagtctctgcctctccggttcaagcgattctcctgcctcactctcctgagtagctgggactacaggtgtgcatcaccacacccagcgaattttcttttttttttttttttctttttttttttgtatttttagtagtgacggggtttcaccatgttggccaggatggtctctatctcttgacctcgtgatccagccacctcggcctcccaaagtgacaggcgtgagccaccacacccggcctcatactttttcttaagataaattcctaaagtagaattttgggttaaaagaacgttgtttctatacatattatgacttgccttacatattttactttgtaaattcaccatgattatttcagtttgccctgttgctctgtaatattttggattatgtaaaatgaaaacataaaaactcactgataagcatctaggatcagtcattaattataaaacaaaatttacatctaggtctaaaggcaagaaagatttaagcataaatgtgttaaaatgtgtgttatagaatgataaaaatggagacgaacagtttagacttctgtattaagtgtatatacatatgccaccaatattttaaagctattatttatatccattaaaatgcctaaatcttaagcatgcaattcagtgagttttgacaattacatacgtctaggataccactatcctaattagactatttccgtcactcctagaaaattccttcatgtctctttccagccaggccccatatcccacaatcattgttatgatttctgtcacaataagttgattttgcctgattttgaatttcatgcaaacagaccatatggtgtgttgagaatgtatacatttaattagttcttttcaaaaaatagttcttgatggatgtgtaaataccaaactgtacttcttaaaacagaaagatccaaagctgatgtgaaaattgtatagaataaaaacaataagtctttcaaaagaataaaattggaccctttgccttagactatatataacaattagctcataatctatcatagacctaagtgtgtaagagcttaaacaaagctataaaactctttttttttcttttttcttcctttttttttttttttgagatggagtcttgccctgtcacccaggctggagtgcagtggtgcaatcttggctcactgcagcctccgcctcctgggttcatgtgattctcctgccttagcctcctgagcagctgggatcacaggcactcatcaccacatctggctgatttttgtattttcaccacattggccaggctggtctcgaactcctgacctcaaatgatccactcgcctcggccgtccgaagtgctgggattacaggtgtgagccactgtacctggctataaaactcttaaaagaaaacagaggaaaagtttggcactgcatttggtaattattccttggatatgacaccaaaagcataggcaacaaaagaaaggacagacaaattggagtacgtcaaagttttaaaaacttttgagcatcaaaggagactatcgagagagtgaaaaggtataacccacagaataggagaaaatatttgcaaatcatatatctgataggggattaatatctatataaaacactcctatcaacagcaaaacaaataacctaattaaaaaaaatggcaaaggacttgaataaacatttttccaaagaagatatatacatggccaataagcacatgaaaaggtactcaacagcactgatcattagagaaatgcaaatttcacaatgagtatgttatcacttcacacccagtattagtacagctgatatttaatattaagaaaaacccagaaaataccaagtgttgtcaaggatatggagaaattggaagcttgcgtcctgttggtgggaatgtgaaatggtgcagccactgtgagaagcagtatgatagttctcaaaaaattaaacatagaattaccatatactccagcagtcccacttctcggaatgtaccccaagacgtaaaagcaacaattcgaccagatatttgtaaacccctattcagagcagcatttttcacaatactcaaaagttggaaacagtcgagtgtttatccatgggtgagtggataaacagttatgctgtatacattccgtggccttaaaacggaatgaaacatgatacacaccacaacatggatgaaccttgaatacgttatgctaactcagacacaaaataagccagacacaaaggaacaaatattgtgtgattctgcctatgtgagatagcaagactaaccaaattcatagagtcagaaagtgtaatggtgcttgccgggggttgggatgggggccggggggttgggatgggggccgggggttgggatggggaacagaatgtggggttgttatttccagggcacagagtttccatttgggatgatgaaatcctataaaaggatggtggtgatggttggccaacagtgtgaatgtacttatgcatcattgaactgtatacttcaaatggttaaaatggtcaattttgtgtatattttagcacaattaaaaaaggtctttagacatggaagataaggagaaaggtgctcattcttttacacagcaaaatagtagcatgttagaattcagtagtggggagttttcaccacacttgaatacgtctctgataagtttaggacaatgccaagtatttcttttgttcatagattcttttcctccaaaaggaggaacaaactgataatgtaagtagattgagctattcagagacaccaggtctgtgatagaaactggggcgtgttttagtatcataacttcaaagctcacatcaaggaggttctaatatctgttccagtgtttttctatgctttcctagagatagaactggactggactatagtttagctcaaggcaagcagctcttaacgtttccattgactgtggtgtgtgatttctatacgtatttcaggaggttcagtcaacagacattcaccgagctcttagtactggacaggcatgtggaatacagtgatgaactgaactagcaagggcctgtcctgtgcagtggactgtccagtggtgtggtggtgttcatggtcaaatgagtttgagaaatcttggatgtaaaggtggacaagtttccaaactttttaaaggatttcacatatcctttaatgtgatgatatggtatgttttctttttatagtatatttgttttttaaacttttttaaattatagaactcatttctgtgtgatattctatagaattagtgtcccttgtaggacccatagggaaattagtgacccttagggaaatgctggcataaagttctgtctgttagaggttcaccaacctacaggacacttgtttcccttgggaggagatcataatgaaggcttcctcctagttctgtcctgaatgccctgatggcttgtgaggagagggacagtcgctcagacaccagaactcagaagagctatggcctggagtgtcctaggtgaaaggcctgggaagtgattggagcacctggtcttgtagtcagggacttggcctttgagctgagtctcttttctcggaaggacacctcctggggtgtcccctcctgccttgtgtgggtgcttgagtttcccagggccacctctttttgggaggatgtggactggggtggaggcaaaatctttatggtaaaagtggaaaattgtgaaataatttagacatatagaaaagtacagaagcaaatataacagacacacttgtgtaattacagatacagtatatacaggtgtatacacacacacacacacacacccacatacacacagtatatataggtataaaaataacatgttaccctatttgcttcacatctttctttttataaaggagcaaagcatggctgaagccacgccccataatccccaattcttttcaatgcacgtttctatacttttgctacatgtgtgtttataaacagtatacactaatatcttacgtattcaaattttatacaaatgatatgatactgcattaactttttgttgctttctttttaaactcaacattgtagtttttagttttgtaccattttgatatgtggcgtcttactccttttttactactgtgtagatttaattgtgtgcctatagcaaagttaacttttcccatttaccttctgtcttagagttagattttgtcctcttctgtcaattgtagtagacaggactgcattgaatatccttcctggaacatgtgtgtttcatggttatatacttaacaaggcgcatggccgggtcatggggtcagtgtacctttaaacctagtaagaaactgctctctaaacttctttaggccaggctcagtagctcatgcctctaatcccaccagtttgggagcccaaggcaggtggatcacctgaggtcaggagttcgagaccagcctgaccaatatgatgaaacccatctctactaaaaatatataaattagctggtcgtggtggcccgctcctgtaatcccagctactcaggaggctgagacaggagaatcacctgaacccaggaggcagaggttacagtgagccgagaccacaccactgcactccagcctgggcaacaagagcaaaactgcgtctcaaaaaaaaaaaaaaaaaaaaaaaagaggacacagtggctcacgcctgtaatctcagcactctgggaggccaaggcaggtggatcacgaggtcaagagatcgataccatcctggcctacatggtgaaaccccgtctctactgaaaatacaaaaattagcctggcgtggtggcatgcacctataatcccagctactcgggaggctgaagcaggagaatcacttgaacctgggaggcggaggttgcagtgagctgagatcgtgccactgcactccagcctgacgacagagcgagactccacctcaaacaaaacaaaaacaaacttctttagaaggaaaaagggggagagggtaacctttgatcatttcactcattttggaggatgagcaaaaagttcagggtatggtgaaatgaaaaatgagtcctgaccctgcatatttaacgtgatacagaaatgtgaaaggtagtacttgcgttctttattgggataattttctaaaataaatatgtaagtgaatcatttttagctataaattttttgttgttgtgtgtgttcatgtcttaaaggtcttctttatttagaaatgagtgaagcaaattcttcttttgctgctgctactgctgctgctgctgctgctgctgctgcttcttcttcttcttcttcttcttcttcttcttcttcttcttcttcttcttcttattattattattattattattattatttgagacagagtcttgccctgtcgcccaggctggagtgcactggagcgatctcagctcactgtaacctccacctcccaggttcaagcgattttcctgcctcagcctccctagtagctgggattgcaggtgtgtgccaccacgcctggctaatttttgtatttttagtagagacggggttttgtcatgttgcccaggctggtttggaactcctgacctcagttgatctgcctaccttggcctcccaaagtgctgggattataagctttagccactgcacccagccagattcttatttttaaataacaaatggaaatgttctgatctgaggcatttttttttgagatctccatttagttcagttttgcaggttttaaaaaatatatatatatatagttagaactgtgttcgaggcaaagcatgcactggacagtcaggacttccatgggccagcagtttttggccaaggacaccgtgctgctgttagtgtaccattcagtggctgtagatgaagctgaacacgtgtgtcagatttgggtagttcaagagatttccatattataatgtgttccttgattcgttaaaatttttcatataataatagcttgcttaataatcattcaacagtacttatcattcaacagatgtttgttgacgctcagatccttttccaggagcttatattctagtgatgaggacagatagtaaacacgtgaacacgtagttaagtgtttcactacataactaaatcagtctcccctgtgataagatcaggttggtcaaggcacgagaatgaccatggttagggttagactggggagggagggccgcccgagctaccagtgctctatgtctccagctcccagcaactgctgactagcgctcagtaactgttggttgcatgtcacttgcatgcaaccgtctggttatatgagttatcctgcatatggttaagaatgaaacgacttaaaaactctcagcaatcagaatagggtttgcaaagcttgggacagtgaagctcaggtgctttcctcacgcatcggtcctttgggccctccttgtgtgggcagtgtgtgtgggtgtcttggtcctcagcatattagaagcctaactgggttcaggtgggggttgagcttgagcggtgagcagtgccagaatgccctgatggcctgtgaggagagggacagccgcccagacgccagaactcaaaaggagctgtggtctgcagcatccagcagaaggctctggggccttccatgtcctttggggcaggctgttgatttgtgtttcataatactattcagtttcagaagtctgaacagcatatagtagatctttcaaagccttgcatctgaatgcattgacaaaaaaacaataatgatcattaaagaattagattttaagcagggtgcggtgactcacatctgtaatcccagcactttgggaggctgaggtgggcggatcacctgaggtcgggagtttgagaccagcctgaccaacatggagaaaccctgtctctactaaaaacacaaaattagccgggtgtggtggctcatgactgtaatcccagctacttgggaggctgaggcaggagaatcgtttgaacccaggaggtggaggttgtggcgagccaagatcgcgccattgcactccagcttgggcaacaagagcaaaattctgtctcaaacaagcaaacaaagagttagactttagcttcagtcagctgggatattctatcgaggaattggtttttaaaggtaacatttaggaaataattaatattttacagagagcactacaacttctagtttaataagtcataatggcacctgtatagacttgcaggtgggactgggcagggcatctatatgacttaggaaggcagtcctgtttgacagttggagatgtaaggcagagtcatgtgactgaccgtattcacacaactcacgtgcaaagggaattggacttagagtccatgtatttcaaacccaaagattctttgggtaaactagagttgagcaatccgtcccatcatggctcccattgaaggacagctgaccgggtccagttggttggcactgggccccaggtctcagggagagcccctctgtgctgttacaggtttcctcagcccaggcttacagaaggtggggtgccagcaaagttggtcctaaatggatgaatgagccgtgtgtctaaaaggatagcaaattggttttaatcgtgaaggagcatatttgagggcacccaggtctcggtttgctcagtcgtgtaggtggttgctccagtgaagatttcttagctgcgcccacctatcctcctcgccccacaccctgcagccaaacttcctggagctggactaggtagtaaaaaattctagtcagcttgtggctgctctagtgttagtaggttcttgcaatctgtcctgttgttgtgttgcttagaaaacagcgccccctccccaaacaacacttccatattgtgtgtgagggcttctgtaaccagaaagtcaacatattaaagcgcaattcataggggagttgctggctgtgttgactgagctttacagtcattttaacactggcagaagtgttatcctaactgctttaaatcaaactgcaaagatgcttgtgtgaaatatagtattagatatcaaatcaaacatatgggtgttgaacggaaggatgtgtgttgtagtggtatatggtattctagcatgtggagttgtattttatggaaattcgttggcttggcttatggcagggacataacattcattatgagatatcaagctgtaaaataaataaaagcaaaaaattcaactgtgctgttaaatggcttgcaatgcagacttttctgctccaacaacttaggctctgtgtgatgagaggcattgtgagccgttatggtcacatttaatctcatcctctttggtagatcttgaaaataatctggattggattgaaagaaatataggaactttaactttttcattttttccccttttaccccattgtatatgttaggaattactgtgctgatttttcttagaggctaaatgttttactcttttcatcttttaccatttcatctttttcctcattcagtatttctatagtggatttgggttttaagtgtgtatctggcactcattaatttcttaagtgtgtgtgcttatggggctcaagttcttgaagttctccagtggaccatattgtggtatgaaacaaaatgactttgccattcttgtctctagagtgctttttgctgtcctgatatcttgtttttcttttcctttcctgctctctcttgaaattacagaaaaaggcaatagatttctcattaagaaaatattcaaaaatactatccatggtatatttattgcatgaggaaggattttcctgtaaacaatgctttcaggcatttttaggctgatgtaaattagagatggagaagattgattgaggccatttttgtctatacctctggtatttgcactgtagtacaccttgctttacattgttacctgttttatcaactaagaaaatgccatccttagcaaaaatagtaaataaaattgataatttaactggtatatatgtgctgtaaatgccgttggtatattctgactttttcattctgaacttagaaacaaacatacacaagaaagcacccaaaccacaggccttctgtaaagtattagtgagttaatttggactgtttgagttcactttttcactgttgtgtgggaatggatttcatatcatgcttctctttcttagtagaggctattttttagtctcagtatttagcacttcctcccctctccacctttatgatattatcaatagtttctatctgatagaatatgatggtttttaaaggcaaagcagattgccttttgacttcatttatagtatgtgaatagaaagcagcgtgtcgatttgtttaaggaagagaggattagaaatattgagtttagttgcttagcagagaacccccttcatgttgctgaattgaaaccatatttgatttcatttaattgcacattttgactttctcatttgctttgcttgactttttgacagatgccacctcagtatggacagcaaggtgtgagtggttactgccagcagggccaacagccatattacagccagcagccgcagcccccgcacctcccaccccaggcgcagtatctgccgtcccagtcccagcagaggtaccagccgcagcaggtgagcacagtgcactgccccgcagggccctgttttctccaccaaggcagacccggctctgaatcatcttcctgtcctttattaaaaattatgttctggtggaaaaaaaattagttttgagaaaatgcataactgtaacctaatctaactccatctctccctccgtcttttccccttttgagattggagggtgagaagaatgactggtttaatagctgcttgcattactggttagtggcagcagaaagtgtcagtcattgcttgttccctgtcatttgtgttctgaacctttcaagaaagcactctgccactttgttaaggcttattcaggagaaggattttatcaatcatttaatccttctagttggcacgtgcatggtatttttatcttgacctttgttttgttttgttttaatggtaagtgctactttgtgaaaacattgttgcctttgactgtgttattctatttaaactagcttataagtagatattcacttcagttgcagtatattaaaatactaattggaatcatgtactttaaatatatcaagcagtttctagtttaaattagtctcattaaatactcctttaggttactgggttatatatttcagcttacagaatttgtggaaaaatagtatatatgttatttgataaaatgattcagtttccttatgttttagagactgtcactcatgagtgacatgaaaagaagtagtgagtgagggactcttactctgaatccagataaaatgttcgtagcacatccaatcataaacatcaaaatataattttccattttaatacttccttccttctcttttgtgtggtggaggtggcaaagagaaggtgaacacatgtagcatcgactttttcctctttaaaggacttcttttgtggcttgaatagatcgtggatattaagcaaaataaataaatttacggagcttaattttaatcagtttggctggtttcttacatattttcttgggtttgttggagtccctttccgtatgacttactagagaattctaaagagagtttatgatttgaagcaaaacatgttaaaacaacagctaggattcgagacccagtacaatcttgtttttacatacatgtatttaaaagcttgaacccgggaggcggaggttgcagtgagcggagaccacatcactgcactccagccttgcaacagagtgagactctgtctcaaaaaaaaaaaaaaaaaaaaaaaaaaagtaacatctgtggggtttgtagcagtaggaatgtacatcatttcatagttacctggtcaagtcttttattaaagtgtatgaaaattttaaaacactttaatataatttctttttagatgagcaaggctggtatctggagttttgataaagttataacctttttcaaggggctttcagagccttattgaacttatctgtagacacagagtgttttgtcatgtcatcaaaatttaaggagtcaatagataaattatattactcatttgactgtagtgtgctgaaatgaatctctgatcataaaaccgatttgattaatgattctaaatgcctgtcattttcttcaagaccaagctcaaaatttacttcctttaaaaattattcactgatgacttccagcacatggcaattagttatttaatatctttcatatttaaatatttaaagcatactacaagtaaaatcttattttaatgaatattattttaatgtgcttagtttcagtctatcttatgctttgattattgctatcattttattgatttgaatacaataaattatatggtaaatactctataaccatgactttttaaagtaattgtaataatttttgtatattctgaataaaaccaaacattgctcaaaatacattggaaattttttcttgggtttgtactccctagctataaaatgtctgagttatattcattgtggggcagagaggtgaaagttggagacatttgagtggcctaatcagatggtctggtttgacaggaacagtcctggattttagggagttggatgggagatagatttggaaagtttctcaaaaaagtgataacttgcattatagatatatttagcacctccaaaacctaagtaatccccctaaatctatcctgaaacaaagtaaaaattaccattaaagtattatcaaaatcaagctaaatcttaataacactgaattcatatacctttaaaaacttaagaagctcaaccatatttaaccagctagtatttcataacgaccagaacatttctttatgcagtctttccttttgttttcaaatgtggtttatgtaatctcttgcttttgtataaggcaggcagttagcaagtattagtagtacttggtgtcttgttaatgcgattgatacagatggtataattttagggttccatcaagatacctgactttgtgtcttcaatatttttcatatgtttaatgttttaactaatcaatacatttattggtttgaaaaaataaaaagtacaaggaagggattccgagaaaagtctcttcccgtcttagttccctctgcccatgtcaccacccccgttcttgactggataaccatttatagtttattgtatgtttttctagagtttctttatatcaagaagcacaataccatacttttatttttaccctatttttacacaaatgatggtgtatatagtatatactacatgccttcttccatatttttttcctcatccccttcttttactcacttaaatatattttctagagatctttccaaaggagcacatacagcaatccctcattcatttttatagcttcattacattttatggacataccatgatatatttaaccagttctttttgatggacatttagattagttctggttatttgaattgaaacaatgatgccatgctaaactttgtgtatgtgtcataagtgggcagtaatatctgcaggatgaattctggaagccacagtgctgggcaaagggtgtgtgcatctgcattcccagtgggtattgcaggttgtagccaattcacactcccatctgcacgtgagaggactcttcctacatatgtgccagtagcatggctttacaaagcttctggatttttgccaatctggtacagattgagcaccctaaatcccaatgtctgaaatatgaaatgctccaaaatctgaaactttctggatgccaacatgacaccacaagtggaaaattccatatttgacctcatgtgatggatcacagtcagaacacatgtaaaacattgtttcagtcacacaagtattttaaaacattgtataaaattgccttcaggccatatatgtaaggcacgtttgaaacataatgaatttcatgtttagtcttgggttccatctctaagatatctcatttgtgtatatgcaaatatgccaaaatctgaaatacttctttttctaagcatatagttttagtttacatttatcttgttatgagtaatgttgagtgttgtcttgtgtatttaaaggcatttgtgtttcctttttcctgaactataaatttatatatattttgaattttctctcttcagttgttggtctttaaaaattatttttaaaatcctttgtatattagggagactgggcctttgtctgtaatatgagttattaactccagaggactggaatcaatagaatagaataatagaatagaatcaattgtgctcacatatgcacgcacacacacacacacacacacacacacacacagatttattataaggaattggctcatatgcttatggagttttgcatttccgaaacctgcagtatgggctggcaggtggtaagccgatggtctgatgaagtcaaagacagcttgctggagaattccttcttgcttaggtggggctggtcttttgattatagttaggacttcaaactaaatggataaggcccacccacattatggaaaacaatctgttattctcagagtctccgttgaaattgttaattccatttacagtaccttccaagatcacatgtaaaatcaaccattgcagctacctttccctgatgccactaaaatcattaactgaatttccttaggtatatggtgtttggggtcattttgggatttctgttattctccattggctcttctatgaatgcattagtattgtactgtttctctattatcttttagtatctgatggggtagtatatcctcattatccttctttttcagttgttggttttctttttccttttgctattcgtatgtgcttattttttcctataaactttttctttttttatcacgctattttctaagaattttatcttttgttattgttataatgggatcttctgtgaaacagggtacttagaaaagaataaagataagacacacagaagcactttacttgaatagctttttcctttttggagcccactgaccaaagatgagaaatatccctgtaataaaaagatgtgtttgtttagcttaggtggctgcaggccagggaggatgcagtcctgaggagccccaggagcactgtggaaagggggaggtggggctgtagtagggttggggtgtgtgttagatgactcttaagagggagtggcatcatgaggaggggtggtcctcaactggctgctctcaagaagctgggggtacttttgtgattaggtattttaatttttatctaggagacaggaggattgaagtggggcagggttgtcattggtaaagaagcaccagccacctcatgcctgtaatcccagcactttgggaggccgaggtgggtggatcacctgaggtcgggagttcgagaccagcctgaccaacatggagaaaccctgtctctactaaaaatacaaaattagctgggcgtggaggcgcgtctgtaatcccagctactcgggaggctgaggcagaagaatcgcttgaacccgggaggcagaggttgtgaggaactgagatcgtgccattgcactctagcctgggcaacaagagcgaaactccatctccaaaaaaaaaaaaaaaaaaaaaaaaaaaagcaccagccacttagaaaaagaagcggggatgtttgtcatttttgtcatcagcaagtggccttgggcacctgttgtttcgggcactgttgctgtgctgtagaaaccatgcagtccgctggctcttctgcctggttttccaatgcttgcctttgcccatttccactccaccatccctgcctctcctgcatgggatagctttccatctctccatttgttgaggtacttttcagtttcttttataacattcttcaaaaagagctgctgtattacttttgttaggattattcttacataccttattttttgttgctattgtaaatggtatcctttaaaaaattacattttctcattgttactggtgtatacaaatgtaacagactttgtatattaactttgtgtgtgtgtccagccaccttttaaattcttgctaattctgctaattctagtgatttgtgaagtctcaggttttttaattaaaataatactttaaaaaatcactgccttcctgcttttttgcctttctgcagactggctcccctgtatgcattctttgaaacggctggctgttcctgtgttatccctgattaaatgaaggcttccagcattttgtcatttaatacaatgtttcccctttcttttctttcttttctcttttccctttctttttgtagctgtccactgttgggctaaggaagttcccttcttttctagtttgcgaagagattttttcatgagtggatactgaattttatcttccgtcttttttgaatctattgagatgatcactttgtatgtattgagatgatcactttgtttttacttataatctgtttttgaggtaaattaccttttaagtatcaaatgaaactcacattctataataaacatagcctcatgatatattgtcttttttattcatcactggattcagtttactaacatttgttttaggtttcttgaatcagaaattcatgaattagactgaactgtaattatccttgttaggttttggtatctgtacttttcgagctttgaaaatgaattggaggccaggcgtggtggctcatgcctgtaattctatcactttgggagggcagatcacctgagatcaggagtttgagaccagcctggtcaacatggtgaaatcccatctctactaaaaatgcaaaaaaaaaaaaaaaattagccaggcatgttggcacacatctgttatcccagctacttgggaggctgaggcacgagaattgcttgaacctgggaggcagaggttgtagtgagtcgaggtcgcgccactgcactgcagcctgggcgacagagcaagactgtctcaaaaaaaaaaaaaaaaaaagaattgaagatgagtcccttttttaatttactgaaagaatttgtgttgttatctgttctctgaatgtttagtaaaactgtttataaagctataaagggttgtatagctctttatctttaccttttgtcttacccctgatttttcaacttttttagtagagatgttgaggtcttgctctactgcccaggctggtctctaactcttggcctcaagtgatcctcctaccttggcctcccaaagtgctgggattacaggcatgaactactgtgcccagccatttaaaatttttgatttcatttcttttgtcaatataggcatattcaagttaaaaatttcttcttgtgtgagtattgctatatatatattcctatgtataggaatttgtccatttcatataatttttcaactttattaacataaagttcgtaatagcctttattactttaatctctgtaccatccagagttaaggcattttaattcataatggtttttcttcttttattcttgataaaaccatttccaaagtgacttggtctttattgtctgtattgtgtgtccttgtaaacaaacttaatgaaattcttctctcaccttgattacgtcttgctttctactttattgatgtttattttgctgttcttcccccccgcccccactcaagtgaatgcttactttatttgaacattttttgtttgatgaagctaaatatgagactaaaattttttctcttaagtactgctttggctgaatctttcaacttttgatatgtatcatttttgttctcttttagttctaagaaatttcttgtttttctaaattgcttatttttttttgaagacatttttattgaggcctgggtttgcattctgtttcctcagaaggattgattggtctttgcttttgccaggtgcctatgggtaccagttatcttgaacaatgttttgtgtttgattttgtgaaagttttattacaagaagaatatacagatacacagaatgacataatgagcactcctatgccctcacgtagttttaatattaccaatattttcccatgtctgctgccctgtctcatcttttcctcctcttccgactttcttcaaagtattttaagtcacagatacatttcttctcaaaatcattctgtatgtgtgtataaaacgtaagggcacttctttttttttcttttttctttctcttttttttttttttttttttgagacagagcctcgctctgtcgcccaggctggagtgcagtggtgcaatcttggctcactgcggcatctgcctcctgaattcaagcaattctcctgcctcagccctgtgagtagctgggattacaggcgtgcacctccacacctggctaatttttgtatttttagtagaaacggggtttcaccatgttggccaggctggtcttgaactcctgaccttgtgatccacctgcctcggcctcccagagtgctggaattacaggcgtgagtcaccgcatccggacaagggcgtttcttatataacagcagctctgttaccacatcttattaaattaaatataattccacttgtctacaaacctagccatgttcagatagccccagttgtcttcagaatacccttctgtatcattcgtttcaagcaaaatttaaacaagatttattacattgatttggttctgaagcctttttatctaggacagtttctcctccccaaaatttgtgccttgacctcttgaaaaacctgggtcaactgtcctgtggaatggctttatctgccagttttctcttgatgtggcttaacttgctcatctgtttcctgtacattgcaagttagatccacaggcttgaagataaacattttatttgcagtcgttgaaaatcatgttcccaacatcttaggcctgcccttgttcacaggatgggtctgtgatcctccttttgagcgaagagcctctaggtggttctagcccccacctttcttgtgaccatcagctacagctgaggctgaagagacattgtgatggacagataaagcttccctttgtaccctctccaaattgctcactaactacattggtgagcacaacacatgctggtgaccctaggccactgagtttggggtggttgttacccgtcatttctgactgacttggtctggatgcttcataggcgatgctgtgcgtttattgtatcagattgagcgtaatgtttggttgtcccacaacagtgaagttaagattaattagagggtttaggtgatgatggtctctggggctgttctaaatgaagtatcttcttgaggttttgtagaccacaccattaagtgttaattttgaccagataccctggtgatggttagcttgtggttgctatttcttaaaggagccacttattcctgctacctctgcatatcaagttcaagacaggtatttctcttttctgtttagtggggttgcaagctcttaaatgatgggtatagcccttcttggtccttaatttaactgagaggtgttgtcttgtattttactcccttttggcaggccctggacttcctctccttttccctgttctcgaatagttgtcaaagggaaagttagaatctatagcaaaagttggcttctattgctctcttggtttctctgttctcggtctgctctctgggtgttcttcatgttactcacatttatggcaagtctgggattcatttaaaaaggattagaaaacgcattttatccagtattttgggtttttcaatcaatagctatttagagcatctaatctgccatactgctggaactggtagtttcatgttttctagttgttcctttggtatcctttatacaattggaaaccatacaaatatgtaatgtttatgatagatcatttagaacatacagataataccttctcattgtttgaatcaaacttttctagtgtctcctttattcttttaaaataaagttcttaggtaatatgagctctccccacacaaaattttaaacaaaattagaataaggcactaactatatatggaaaatgaaaagaaagaagtatataataaagtattgtatgcttaattaaacaaatatttaggcatactactttagaagacttgtgaaatagatgcttgatgtatatgtgtgatcactgtgaacttgacagctacaaaatgagattgatataggaatgttgcattggcaactcagatgtctccagcagggttgtcagtggtgatgtcatcttttgaaatgatgagcaactgttggcaaagttctgagcaaaacaaagtataatcttccctcaatatacgtgatggttttgtttctggaaaatttattatgtcataagatgattttaagaacaccttgttcttccttgcaaaatggagttgggttctagactcagctaaataattagtttttttttttttttttttttgctttgtttttaaatatacccaaactttggcacttttgaaagtagtgtcggctgtggcatggtgatcttttccatcagtcactcttacacattgcaggataatctagcattcctaccctatagccactgtttaaatgcatttctgtgtccttgtgacaactaactactccgttgaaattttgtcactacatgtgttatatatgtccttaattttcctgaaattcatatgtaaagtgagttccctatgtataaaatttcaaacatgagtatgattccctgaatgtaatggaaagaggtaggaaaggacagaaagctgcctataacacatttgtgtttctcttaagtaaatgctcaggcacttctccattagaaggcttgtgagagagtcagaggcttgtgcctgggtctgtgggagccatggactccacaggtgcaaacgaggctgctacagatgtgtgggatgaacagctcaaaaccacgagcaggcatagaatccatgggatcaatgaccacacaacagtaattatagaaatgaaagtatagaagaccactttaaataacatgctcacagagttgttagaaaaggtaagttaccccaaagtctggaaatgttataaatttgtaaataaaatacaaatacatagtaaaaactggtaagaaagtaaagatttcttttcttttgctttatttgtattttctaaattatctacataaacatgtaatgcatatataatattcttaaatgttgtgtaaaggattccacgttacccattatacaatgtaaggaattacccattccggtggcagactaggtgctctcaatgtctctattgatcaaaatatctaaaatgctggctcagttcttcaaactaaatgaaacagtgaatcaaacctctttttttttttttttttgtttaactgtttcttatgcccctcctgtcatccctttcttccttacccaactaaaattccaagcccatcattatactcgccctcacgctcctgcatgtactcttaaatactcaccagccccatcttattaaacctatttatgcaagcctgatgaaatccacttttgtgcccactccaggtgagtgggatggggaaagagggagggaagaccctgctatttatttgagttggtgaccactgatgttagatcatccttgccttgtagctttgcatttccctaaggctatttcagatctccctctgtcttcaaacccaaaaggcttaagccctgcccctcactctgagctagtgaggctgcttcctgtttcattgaagaaatcaacacaagcaatcaggagaacttagaggtaccagccagcctgtgtctgcatatcatgtctgccttctgtgatgtacacactctgccagaaatctccttgttcctctggaaggctgctctgtgcccttggtccactcaagttcttggtttttccccacaccatccatttctctgtccttcccattggcatttaaacatgccatcatttctcccaccccaaacaaaacaaaacaaaaacgcctttcttgaccgaaaccacaagcctgtttttctcttttcttgtattccccatttgctggtatcccttgaatttactctgtctaggcttttatttcaactattctattgaaatggctcttttcatactttcttttttttttttttcacttgctttgtaaattgagaggtaaaattgtatgtatttactgtgtacaatgtgatgttttgaagtatatatactacattgtagagtgagtacatctagctaattaacatatacattacctcacatagttaccattttcgtggtaggaacgctttacatccactcaacatttttctttttctttttttttttttttttgagacagagtatcgccctgtcactcaggctggagtgcagtggcgcgatctgggctcactgcaacctctgcctcccgggttcaagcaattctcctgcctcagcctcttgagtagctagaactacaggcacgcgccaccatgcctggcaaatttttttatatttttagtagagacagggtttcaccatattggccaggctggtcttgaactcctgaccttgtgatctgcctgcctcagcctcccaaagttctaggattacaggcatgagccacctcacctggcaacatttttcaagaatacaatatattattaactacagtcaccatgttgtacaacagatctcttgaacttattcttcccatctaactgaaattttgtatctttgatcgacatcttcccaacttccagcccaccccagcccgtggtgcccccatcccactctctactttccaacaaccagcccgccccagcccgtgagccaccatcctactatccacttcccaactcccagcccatgccagcccatggtacccccattccactctccactccccaacaaccagtccatcccagcccgtgaaccaccatcccactctccacttcccaacaaccagccaaccccagcccatgagccaccatcccactcttcacttcccagcaaccagcccatcccagcccccggtgatcccattccactctccactccccaacgaccagcccatcccagcccatggtgcccccattctactctccactccccaactcccagcccttcccagcccgtggtgcccccattccactctctactcccgaactgccagccccaccccagcctgtggtgcccccattccactctccactccccaactcccagcccatggtgccccctttccactctccactcccgaactgccagcgccaccccagcctgtggtgcccccattccactctactccccagctcccagcccttcccagcccgtggtgcccccattccactctccacttctgagattacctttcctagaggccacatttgagtgagatcatgcggtatgaaacagctcttttcaaagcctccagtgttctgttattcagcctgatgggtgatagtcattccttccatccttcgcctgtcattaggattccatgcagctgacggtatcttcctcctcggagcacctgtcttgcttggttcctgggacgccaccctctcctggctctcttcctactttgtggccgctccttgcctttccttgctagattttctttatctttctggcctccaaatactggcccatgaccagggctcagtgttggcccctctttttttgtggctctacccaccttacctgtatgatttcttttactttcaaagctttacgtatctggagacttgtgactttcatatgtacttttgcaacttggatctgtcttgtcctttctacatctatgtatgtccagctcctgcaggtaatcactaatttgaatgcccaacaggctttggaaaatcaacatatccaaagcgggcctctggccacccagccctttatccacaaacctgccctgtctatattttcccccatcccaacaatatgtatgtcaatccatcctttctgaccctttgaaatctttggctcttctctatcaagcccactttttttttctttttttccaaataatgtgtgtggtttcaccttaagaaaataagatttatgagtggaaggactttgttttgtcattatgtccccagcacctaggtcaatgcctgcacaaagtagaaacttagtaaacatggtgaaaattgttgatttaatcattcaaaaaatcttttttatttgctgaaacatagtaaaacatactttacagtgttgaagaaggtaaatgtttactgctgggtatttaaattttgtgatttcttttggaattgcagatagtgctttgtggaatgcttttatagctggttcctttgtgcagtatagatgcatgtatgtgagcaaacaggctttcttctttgatagaattgctgggcaaaagaacaggcacattttaggccaggcgcagtggctcatgcctgtaatcccagccctttgggaagctgaggtgggtggatcacctgaggtcagaagttcgagaccagcctggccaacatggtgaaaccctgtctctactaaaaatataaaaaattagacaggtgtggtcgcgcatgcctgtagtctcagctactcaggaggctgagggaggagaatcgcttgaacccaggaggcagaggtcgcagtgagctgagatcgtgccactgcactgcagcctcggtgacagagcaagactctgtctcaaaaaaaattaaaaaaaaaaaaagcacattttaaagatttggttttgggcgggctcagtggctcatgcctgaaatcccagcactttgggaggcccaggcgggcagatcacttgaggccaggcgttcaagactagcctggccaacatggtgaaaccctgtctctactaaaaatacaaaaattagctagatgtggtggtgcatacctgtagttgcagctacttgggaggctgaggcagggggatcacttgaacctgggaggcagaggttgtaatgagccaagattgcaccactgcactccagtctgggtggacacagcaagactccgtctcaaaaaaaaaaaagccccacctcttttttaaccaaattcctctctagaaggttttttaacaaattacgcgccccacccccccagctcactttcctacattttaatatatattttccagtggttcttattttaagttttatttttagtgaggatttaactgttttctgagcaccgacagaattaaagagccctcacagaatttggaattaggatggatctaggtgatgtgttacaatgatggaacagatcgtggaaattcgattgtatcaggaagaagtacacagttggacattggtaattttttttgatttactgctgacactgcggctccatgaattccacaacttcttgttgtttacatttttgttaccattaccatttcttgtctctgctgctctttttagggggcagaattagaactggagtgagtaggtctggtttattcttcctgttgtagatagaggataactaggacatcagaggttcacactgtgcgttcatcagacatcttatttacccaacactcgtcatttccttcttttaaaaagcatctatttttatggcctttaaaaaaagctatttgaagaagttgcttccattttaaagtatttttacatcctagcttacttcctcagacttcattaaccgagatttaatacttttatatagaaggggaaagctccttcaatgctgtggtttagtttttgttttgttttgctctaacgtttctgcttgccttatgtttccccgttgtcaggtctcgatgcatcacatgcaggtctgcttcccggtcccctcttagcaagctctcatgacctttctctctcctcctagtacctttagactcagaatcgttttccttttacctctgactcctgttctgcttcagacttactctcctaagatactggaagagacctcctttcctgttaaggcacacatttctccaggaaccttcacccatcgtctcctggcagatgttgtgtgttaagtgtcaaggccagtgttccaacaatcaggtaactcaaagagagttgcctggccgcagacagggggctgtctgtcagtaccctttcttgtgaccgaggtcttctgctggtctggaacagttggcatcctcgcacaaccctgtctgttttcatggctttaagggacactgttgtgccctcatagccagaaaaacctttttcttttcttagagaagagttgtagcaagtaaccctatttaagaagtcaccattttttttttagagagtatggatctttttaaaaaaccttagtgtaaagcagcaacataatttcaaacttggcttttatacgtatagtttctcttcaagttgatatagttgtttcggattcttaagagaaataatgggtattatgaaagtgtacttatttacctcagggtctgttggacaagcaaaacataaaccattttatgagcccctttgggcttgggactgttttgcatgtgggaatctagtgttgagtcagacgttgttgctgacctaaaggagcccctagttgaacaggagggttgacggtgccgtgggaggggtgtgtttcaagctgtgattctagtgttgtgaggcttaggagaagatgttgataaaagtgtctcagaggaagtctggaagaatgaggaagactttgctggtgagagaagaagtgatcctgggatagggccagttccttgttagtgaaaatagaggggatgcccattcctgagagatactgaagtagacaatgaggtcagttaacagtcaaggtcatttagatggagcatattaattatggtgggaactggtgatttatattgcctttgcctcagtgattaaaaatgaaatgaggttatttattgttcaatatcatttaaaacagaaaatagtactagtttagcagttaacttctagcagtagatcacttggtagttggaccaagtggaaatctgagtctacttttatgagagtaggtagatgggtgtttaaatgatattttctaaaatatctttcttcagacatctttttggtcagcaatttttaaaagagatgccgtgaactggaagtacttggcacatgggcaatcatttggaaaagaacaaaatagtactggaacatgggggtaaaataggtttcaattttttaacataaaatatccatcataatccacatagtaagcaaaatctttcaaaggagcttaacttagaaaaaatactttttttaaagctaaaaacatagtgaaatatatttttgatttaaagcttgtaacagcatgccactcaagtcattgaaggaacacagaagtcacattagggacagaggctgtgatccattgtggggtaaacagttccttatattgttgttatttatattatgcaaatctgtttcttatatagaaataagaccaaaatttaatttataagccaatcctgcagattttgggggaaaattaaccttacaaggcctgtggaaagccactgaagtgttcatttcacttattttaagattttattataagagcaaaaaaacaaggacatatatagtttgttgccattaattgcttagtttttggatattaacacagtctattaactcagtaaaaaccagaatatagttaatgttattctttgttttaaaggatattattagtgaagacttgggttatgtttgaattttgaatctttttctttcttcttgctacagttgtctcaggctttgaaccattgctgagggagatttccttttaagtttgaagagcttgtaagcatccgaggagacaacttctgggtcacttagtggctgagcaaggcctattcctagactctgattgttgacttggggcttctaaccttgtgttggggccggttttgggagcacagaggtggggttagataggctgcaggagccaccagcctgcctgcgctcgctctggcaggatgactgatgccaggaggatgggaatgaggactagtgaccttcctctctctgttccctttttctcccttgggggaaaaactagtatagtaaaagctcagcactcgttttgaatataggtgtaatttgctgcgttaacagtttcagtttattgtgtgttttggtggcgttattcctgaaagcttcttaaaataaaaaaagtagaaaaaaagacccattgaagaatgaagaaaaataacattttgagaatgttagaatgtcttttggtatgaatttggttttcttaattgctgtagaaatcagggtgaatctgtagttagttgcaactatgtctgcctgggcctttgcttttccttaatagtagcagaagaaagcaagagaaaaatcctcagattttatacacatcacttctagtatcgaagcatttttggcttttaatggaaaactttcagtgtttttttaatatgttttgaagtataattgggaatttaattgcattggatcataatttgataatgctatgtattcattttcatatttaacatatattttaagttttttttttctttctagtaccagaattaaaaccaggaagtgaggaattatatagtaataatattttcaatactaattttagaaaggggatggaaggctcctcctgagaagagtagccaggaagccaggcaggcctggagtgtgtggccagctgtgtcctggtttgaagcatctcagacactgttgggcagctgcttagcccagtttaactgaaatgtggaggagatcacatcagctgggcatgactgtctaccatggaggcaggagaggaaaaccttagattgttgaagatgtatttcttagttgggcgtgttagcggacatctgtagctccagctgctcaggaggctgaggcaggaggatccctgagcccaggagttcaaggctgcagtgagctctgatcgcaccactgcactccagcctgggtcacagagtgagaccttggctctttaaatgaatgaatgaatgatatatttcatcaaaggctaaagaaaaacttcaaacaccttaagaggagggtttagtctaaagagcaattaagcttcacctccttctctgatcctaacactgctataactaactgtaggtgggtgatccctctctcccgccagaggaggatttatggaattgaaccagatgtcttcacgcatgagtggacattgccttgttctctagtttttagtcctagttccccagactcagcagccagtggaagaagaagcctgctcttctaaaccagaaagttgggtagaactggcgctctccgagcaagcctcctcattgcaccccttcacctccctccccttcagctccctgggcctgacagcccatctgtcttcctctctgataccctgctcctgcccccattggtattgagggatgaagttgggaagagaatgcagtgtgcagttaaaagtatcatcgaggctcattatatattcactaattctctttccttgatatttatattctgacacaagggaaattggggaattatttttttcctggattgtttttttgctactctcagctgctttcatttgtctttaacatgctcatttcaatatgttaaactatgaaaaatgaaataaaacataatttatacataaagttctttcttcatcagtttctttgatttttaaaatttttaattagagtaacaagctctatgtatattgtattccagaggaagattatcttcagatgtttgaaatgtagcattatttttagcatttgctaatgtgggcagtggtcacctttttctttttttctgcaaaagaaagaacagaaccagcttaggtcactgattgattttccccaaagtgctaggcttttgggagaggaatgggtttatgtctctttgcattagcctagggagacagaagaagatggtgtcaggaagtcgggcagggaaggccctttggtatgtatacagctgtggttttcttttctttctctttttcttgttcttttcttttcttttttttttttgacagagtttcactctcgttgcccaggctggagggcagtggtgcaatctcagctcaccacaacctccgcctcccaggttcaagtgattctcctgcctcagcctcctgagtagctgagggattacaggcagtaattaattaattaattagcagggggactccaggaccctggaccccactgttttaccagttgccaaatatttggtgtatcttccttgcttgaaagcagtagttctcatgtctgctttccttatggaagagcagtgggggattaacttcaggatgaatatattagtcaccttgcttggaaagttggaggtgttcattttaacataaagtgggatgaatatatagcttgccctccttggaaagttggaggtgtttaacataaagtgactaaagaaataaataaagtgggtaaataaataaattttattttaatttaattttgatgtaattgatgataatttcagatttctggagtcatctttatgttttttcccaaatggaaatttgactgtttaaaaggtaaaaagtcttctacagtaatagcacttgatgggaaaacacacacacacacacacacacacacacacacacacacacacacacaaaatgtaagggaatctctaaaaaattcacattttctgctatttcttggagaagggggatgcctgtggcctgtctactttcgtagaagattggtaaagttgatactaattggatgctaagttctttttagtatattgtttttctgaaagtctgtactcttagagtggggaagagataatttagtagatcaaatgatccattttaacatcttgtaaaaagttcaaaaagtaatacatatttgtaaaaaaaattcagcagaatccttgtgcttcttgcattttgaaagcattattgatacaatgcaaaacaacagaatcttctttatcttttattgtctttggctgtttcttctgtttctctagctttttttttctttttctttccttcagttattttagctttcattccataggcatttcacagagaaatcagacaacttttgagattaaccccctcagcagttttagggatgaattggcaagacaggcttttgaggcaggatctttctggcactttacttcactctctttggcaaaaagaaggtctgtacctctttatccagcacgcgggttcaggagctctgtctcagcaggtcactgtcatgccacttgcaaccccccatggtattcatctaagtgaagagtgtggataataacgtaaggggtcctgtataggttgcccttttttttttttttttggagatggagtcttgctgtgtcgtccaggctggagtgcagtggtgcaatctcagctcactgcaacctttgcctcccaggttcaagcagttctcctgtctcagcctcccaagtagctggggttacaggtgcatgccaccgtgcccagctattttttgtatttttagtagagatggggtttcaccatgttgaacaggctggtctcgaactcctgaccttaagtgatccgcccgcctcggcctcccaaggtgttgggattacagggtgagtcaccatgcctggcctaggtagctctttagactagagttacttaagcagtctgggcttttattgcatgtttaattcagatactaatggcatatttgcaaattcttaagtaatttttatttgtgtttcagttatttagaaaagtattacaatgttgaatgtggttatttgcagctaatctggttcaaaacatctctatgaaattatgatgttttcagttttggtaaatcccattgttgattatctctgttcttaccctttaatctttctggagtctttgagaatctggtaaaagctacagattctcctcccagacaaatacatgcatcacagagttgctgtattctcaggggagtgttcaaagaccttctactccaggtcaagaattcaggccctagatatgagttatggtcccagtgtggggtaggaagaactgatgttgctagtttctgaaggcctcctgtggccctccaggtctgtggctcgtgtgccggaagtagtctgcttcttggttgggagaagaaggggcttgggttcttggagcaagaatcagccttccaagtgtgagatgccagtgcagggccatgtcattgaaaagctgatgatgatcttctcaagttgttgctttaaccacagtaagacaaataagaccatccctggcccaaggaggataggtgaagggtgggtggacaggtatctacctgggaaattagccattgttaatgttacagcaaaatgccctattacagatgctaggtaatggagtaatatccaaaaccccacattgtaggactcacttaattatcataatttaatgaaaatataacactgtatttaatcaacagtcctcgaaatttatagacaaatctgggaaattcagattcctggaccccatcctccggttgggaattgtcagctgtcaggtagggtccagaagtgcctccttatctggtgggtgggagcatcgttaagtgcacacactctagagaaagaatatcttggttcccatcccttctccaccacttgccaactgagtgaccttggcaggttactcaacctaattttcttcataagtaaaatagtacttactttatggggtcagtgtggaaatcaagagtttattgtatgagtaaagcacttaggagagtacctgatagatggtgtgatgtagaattattagcagctgctgttactaccaacactgtcctcagcatcatggccactggataaagttctattagttgattctctttttttttttttttttaaagacagagtcttgccctgttgcccaggctggagtgcagtggtacaatctcggctcactgcatcctctgccttctcccaggttcaagtgattctcatgcctcagcctcccaagtagctggggttacaggtgtgcgccaccatgcccagctaatttttgtagagacaggtttcaccgcgttggccaggctggtcttaaactgatctcaggcgatcttcctgcctcagcctcccaaagtgctgggattacaggcataatctatggtgcccagactgattctcattcttaaatatgcttttaaaaataacaatagctgacatctgtgaacatttaaatggcaccaggcacagtgctaattgcttgaaggcagtgtgtcatgatcatgaatacaaccttagaaggtaggttcctgtatcttagtagcaggtcccttatacagtcatcccccttgtcagccaggggatgggataagttccaagacccccagtggatgcctgaaagtgtggatagtactgaactctgtgcatactatgcacaaatttctttttcctttacagtttcaaggataaaagattcattctttccctagatcttagcaacctcaggatgtgctatttttttctttgcttattaagtcaagaacttttcacttaaaggaagtagtttacagcttctctttggctgactgattgccagcatcactattctggtgccttggggccattatgaagtaaaattagcgtgatttgaacacaagcactgatactggatctggtaacagctcctaagtgaccagtggatgggaagcgcctgcaacgtggattgcctcacaaagggaggagtcacatccaggcgggcaatttaaaattgtgaattgtttatttctggaattttttccctttaatatttttgaaccacagttgaccatgggtaactgaaatcatggacagcgaaaccgtgggtaagggtggtggggagctactgtatcttggttttatggatgaggaaaggaattatttaggtaataagttatagggagctgagattcttggatgttgtatagatttttaaaaattattagatacattactttttccctacaaaaagtatagagagcagaacatttactgtggctcatttgcctttatgactttattaaaatacattcattattaaaaatcttaactagtctttagtcttgcctatcattatgttgattattttaggaaaattaattttaggcaaccatgtggcttcctttctcattctgagcccactgttagtttaggaagaagtcttatgaaaacttctttcctacgaaagaaggcaaatttaaaagcttgtcttaagttttgaatataaattagcagcctctaggattcttgcttcttaagcttaggggagatggctgctcttggtattgctctgttcttttcttccatatcccctcagggttcctctatactgaagccagggactgcaggtccttgtttacatgggtgtcctgtgccatggtgacattctgtgaattgcaggcgttttgcagtgttgagtcctttgtcagtaagactgagacttatcagtaagaaagcatcatgaagtagcttatacaagcctgtcctttttctagaatggttttttgttgggtatggtgccacacacctgtagtcccagctactcaggaggcttaggagaaaggatccactgagcccaggagtttgagtcacagtgagctatgattgtgccactgcagtccagcttgggcaccacagtgagaccctttctctaaaaaaaagaaaattataaaaaggttttaaaaaagtctggaaataattattcctttgaattgatagaaaataaataatatcctgaatattctttggactcattaataatatatatagtttattagaaggaatatggctttaagcttctaattggcctctgggattagttgcagttaaaaagcatttgcagtttagacatgtgatttttatctaaactaaaagatttttggagcagaggggaagggaaactatcgatgtggactgggaaaaattgaagggatttagtagtcttctgaacagataatgaacagtactcatcatggcacatgcaagagacccattccacccctgttctttgagcaccatgagcctgagatagacaagcaggaggagtgaaggcacatgtgatgcactcgtagtctgcataggccattgccacccagtatggctggtggaataggaaactaagctgtttggagtcatacagctgatgaatagtgaagttggcatttgaatttgggtttgtctgaactcaaagattcaaggtccttagaagagatctgtggctgcataaggcttcttggagctggtgaaataggacaccaggcctttaagaggtggggttaagataaagtcagagtgtgagatttaggctgggagggcaccttcagctgagatcaaaagattgaacaaggatcactgagtcaacaagaagagcaggttttactttgggaacctaggggaaaaatgaaattgttaaggttaatttggttaagatcatggaggggttttgttttgttttgtttaggatagctaagcattaggatttaatagtgcagcaaacatgttaaaaataggtgggggcattatgaaacagaaagattgaaagttctatggttaatgcttaatgtatgttcacaggggaggaggttggaggcatagtttttcagatgaaagccagagtcagtctcagccccactctaggttcatgaagttgcctttcataccattaacttcattcagtttcctttaaaaggaaatttccaaatgtaaacagaagtagataatggtgtaattaatctggcacacgtcactccaccttcatcttgtttcacctctgtctcccccttctcatccccgtatcccctgtcccttttattattttgaagtaaattccagatgttactattttgagaaggagtctctctctgttgcccaggctcgggtgcagtggtgaggtctcggctcactgcaacttcgcctcccaggttcaagtgattctcctgcctcagcttcccgagtagctgggattacaggcactgccaccatgcctggctaattttttgtatttttagtagagacagggtttcaccatgttggccaggctgggctcgaactcctgacgccgtgatccgcctgccttggcctctcaaagcactgagattacaggtgtgagccatcatgcctggcccagatgttgtatcatttcattggtaaatatttcagtatgtgcctttaaaagataaagaactttaaaaaagagacataatacagttatcactattaaaatataatttattcctatcaattatccagtattcaaatttccaataatctcataaatggaatatatattattgtttaatttacattgtggggtagtttgaatcaggatccaaataaagtgttaacaatttgttgttatcttttaattactcttcatttctaggattttcctccatctcctctccttctcgtcctctcacttttcatttttttctgttgccatttatttattgaaactgggacatttgtctagtagagattcccacagcctgggatttcctgattgatttgcaatggtttaacatgttgcttggacctttttatttcctataaattagtggtttgatctgcaggttttgtcaaactcatcattttttgggaggtgggatattttattcctgatctgttttttggtaagcatcaaatgtcttgatccccaccccacccccgcttctggtggcattattgatgctctctgcagtcttaatttccagtatatttttactgcattattttgcagtcatccttttgccataagactgccagtaacaaacagcaaaatgtgttctgtagcacatttaccaggcagagtagctgctaacatgataaatattcttggatgtgtgcccaagttttgttcagttttatgtgtttgtccttatacatttgtttttgtgttgctgtgtctaattctaagtataagctcctagaaaccattcagtcattcacctggcttttatccagtacccatccttgctgggcccttgggaatccaagacgatagcatccccgtcttagaaaaatggtgtccagtttgggatacaccacaaatagttaatatatggcattctaagttctttaagaggagcccatttgaggttggtttgaggtagttgttttggagggtgatagggttaacttctagcaggatcttgaggacagtaaggaggaggaagggcatccacttggactggctgaaaggcaccgaggagcagtggccgcatggcccatgggacccgagcagctgaacaggtgaagtacggttttgccccacaccctggggccggccctgtagaagctgacctggtggccggagggtgcctgaagagctcttctgagcccagactgggacttaaacttccttctgtaggccttcgggaggcattttctgagcacttgtatttgaggaagtcagcagcattgaccgcagtgcaggtgtctgccatcggatcaggaggaaggggatggactgggtgatgatttgggctttggtgatgtgtcagacgtgcacagattgtagaagagataatgagttgtgtggggtggctctgagcaatctcatttgggtgctctccttcggtgaggtgggggcccaagggagaaggaacaggtctgtggggtcatttgggagagtcatttcttgacccgatgagtgcaaggcactctctccagaggtccaaacattaaggatgcagttaaggacctcctgtagagatttgggaatcaccaccaagcagggggccacatggagtccttggggtacagacacttgaggggcccccattcttaaaggacagggagaaagagaagagccggtagaggatccttaaagaacataatctggcaggcgggccccttcacctggcttgccagccagcctgtaggcttctggtaatgcttgatgataaggagtgtggctttgccttcacacctgtggaagagaatttttcattttcgcatttcttacttattcatgttactggaattgatgttttagaagtgttccacgtataaactacttaagattataatttttcaaaagagaatttaggggaatatatgaagcccaggataaaaccttaaaaagctaaaattatattcaatcccttattatgtgatagtgtttgaagcttccagttgtctctagtgtacagttattatagaaatgaagagatatccatcactttcagttactccagcctagtgctcataagctagctctgcaaatgacttcagtttttgtttcctggtaggaaaaaacgaggtaacaatagcaactatcttgtggtggtgtcgttaggatgaaccgtgcacactacctctgtgcacagtacctgtcacaagtcccctcttgcgaatatgagctgtcagtggggctttcctgaggtggcaagggctgagcatgccatccttgatgtgcatgttgtatggatttatatcgctttccttttggaaatgatatttgaaattcatctacacacagaaagtggagggaggtcaataatatgccaaatgtctgaagcctagggatgatttcacgaactgtggcaggctgtgtggccaccaggcatcctctctgtggaagtggtcgcagccacctctcccccaccctcacatgttggggataggcttctgtttcccttttacgatttggaattggtgatagggaatttccaaagcacaaagagaaaaggatcaagaaattattgagactactcaaatcgtcattcattccctcattctgaattattgcaagataataacaatgtggccatcttaactctcttcctagcatatctatacttgatgtgaggattggaaaaacttttcttaaataacatgacagttatcacttattccagatccagacaccatggaggctctgttgcattttgtttctgacctgacgctctttgttggattttgctggcatctagaggcctcctcactgacctcttactaggtgccattgccatttgtttgtcaaggaccaaggtgctcctttccctcctccattcctccatcatctgttagtttatagtctgtatgctcttaaattctttttttttttggttactgtctacctatcttcccactcatcccctgctctggttttgctactttttatgatgtagtttgacacctggagtaagttttgttctattccagaatgatggactgtaagtgtaaattgatacttcctttgttaagaacaatttgccagtatatattaacatttcaaatgtagcaatctgatacagtttggatctgtgtctccacccaaatctcatgtctaattgtaatccttaatgttggaggtggggccaggtgggagaggattggatcatgggggcggtttctcttgaataaggtttcagaccatcctcttggtgctgttctcgtgatagtgagtgagttctcatgagacctggttgtttaaaagtgtgtagcacctccctgctctctcccttgctgctcccactgtgtgagccacctcactccccttttgccttccaccatgattggaagcttcctgaggcctcctcagaagcagaagctgccatgcttcctgtacggcctgcagaactgtgagccaattacacctgttttctttataaattatgcagtcttaggtatttctttatagcagtgtgacaatggacatatacaaccctttgacagaaatttcacttgtaaagattgatgctacagagattttcatgtgaagatatatgcgtaaggatgcttactatagtgctgtatgaagaacggaagactggaaacaacctaaatgtacatcaataagtgactggttaaatacgttactccacctacaaataatgcaatgttgtgtggccataaaaaaaaagaataaagtagatatttagttgcagatatagaatgagctctacaatatattaagaggctgaacaacgtgctgtttacagaaaatatgctctagttgtatataaaggaaaaaggatttaaattcacatttaaacttggtaacacattgaaaaattgcagaaaggtaaataaaaaaatccaaagctaggccaggcagagtggcttatgcctgtaatcccagcactttgggaggccaaggcgggcagttcacaaggtcaggagatagagaccattctggccaacacagtgaaaccccatctctactaaaaatacaaaaaattagccaggtgtggtggcacatgcctgtagtcccagctactcgggaggctgaggcaggagaatctcttgaaaccgggaggcagtgcttgcagggagccgagattgcgcccactgcactacagcctggactacagagcgagactcagtctcaaaaaaaaaaaaaaaaaaaaaaaattcaaagcttataccatgggaatgttttccctttttaattttttaaaaagtgtctttgacgttttggttattctgcattttattcaaagttacatattgctatttggattttattcatttcctaatgaaagaaaacagaagcactcctgctcctggcctttctactaggcccttgtaatagttatctttaccctttcctgtagtagaagtgggatactagtgttttcctcctggtcatgtttcatttcatactgtgatatgttcaagtacctcgcaaagggaataagcccatagtaggcattcagtcagcgtctacgacatttgttacaagaggcctgggcacagtggctcattcctgattttcagcactttggcaggagaatcacttgaggccagtagctggagaccagcctgggaagtatagtgataccccatctctcaaaatattaaaaaaataaataaattaggccgggcacggtggctcacgcctgtaatcccatcactttgagaggccgaggcaggctgatcacttgaggttgggagtttgagaccagcctgaccaacatggagaaaccccatctctcctaaagatacaaaattagcaaggcatggtggcgcatgcctgtaatcccagctactcgggaggctgaggcaggagaatcgcttcaacccgggaggtggagattgcggtgagctgagattgcgcgatgcactccagcctgggcaacgagagcaagattccgtcttaaaaaaaaaaaaaaaaaaaaaaaatcagccaggcatagtggtatgtgcctgtagtcctagctactagggaggcatgggtgggctgaggcaggagaattgcttgagcctgggagttagaggctacagtgagctatgattaggctgagccacagatcgagaccttgtttcttaaaaaaaaaaaaaggggggggggcggggtgaagaaataccaaactgaaaatttctgaaacaaatgtgtaattactactacgctaaacttttttcacacctttgtttgtgagtcagtttccctttaacctttgactcgtaacataaagaaggttaaggccagagtccatcaatggttaaaagattgtgagtgagatgtagaaaaacagtactgatgaattctgaaaggggaaacctcatttccattgcctggttcttgtgcattgcagtattaccacaatatggcattctatacagcagataaatgtaattatttatatgtgtatattggtttacacactggtgttcactggctgcttaaacttacaaataaccaaagatggcagtaatgttttaaagtgtaaagctgtgcttctttgtttataaaatatgatgctgaacatattctttattttctgatactgtcattgcctttttactgtgtatttgctcttcttgagatgaaaataagtatgtaccaaaaaataaatatagctttttaagatgaaaaagctcaagtttcttatggaatatttttatatcattattaaaacagccaaacagactttatagtcccactgtaagttatatgtagttgttgattgttctaggtttaaacttggcaccttttctatgtgctcccttattaaattaatacttatgttcaaacataagctgaggcagaacacgtttccttttcaatagttctcactaaattttgttttgattttatttccaactgtacttaatagctgaaagcttcttgtggttaggaatagtatttgagattttggtggcatctaattattttgaacttttaaagccttaaagagtgaaatataaggccacaatacatttttctgatagctttcatagtctgttagtctgtgttgcttattttagggggacgatgtctaaattgaaatgtttatccactatagttgtaatgatctttttcagcctctttagaaagcagttcattgagcgaagaagagaaaataaaaagaaacataaaagggtaatatgcataggacttttgagcctgttactatttcctagctgaagtttactttaaaaaaaaaaaagtaggcattgggcagacactgtgtgcacgtgtgttggaggaggaggcggggcctgctcatttgtttgcccattgtgaggctgtcctgcacctttgtgcttttttgtaacagggtgaaggcccctgaatagaggccttgtgccctgcttgatttgaaatccatgctgtttatggaaaggaacctgcagggcacccagcgggaagtctgtgtgacaagtggaaatctagaatctggaagaaacgtggtgtttgagggggaaggtggtggggagagtggtcataatctttcagcctttgcttttgtgccccacaagcttaattgtcaccctctgctggcaaccagattgcagagccactctgtaagtgtccttggattgcctgtgcttactctcaccttattgttatcaaataaaaacctagacaaatagcattgaattctcttagaaaaatatgatatgaactgggtacattactagtagaggttaaatatctgaggctttttttgtttgttttttgtttgtttgtttttttggtggagatgtatttaaagggaagaagggctacatgtgaaaagctggaattattggcacgctcctgtatttcagagcgtgttgaaaagcaggtcgcaccaacactaggctggttaaatccagtttgtacagcttgtgtacttggtggtaccagctattgctccaaagtttcctggcttaagaagccatgtaattttaagtgtgcaagaaaggggtgggacagcagaagctttttataggatttcaagtaataaacattaatttttaaagcaatattccagggacttaacagaagtagaacttgtatatgatgtttctttaataccaacacatatttgaactgacaagggaagggagataattttattttaaagcaatattttccattctttttttctcttcaattagaaactggttcttcaactttcagtgccaattgagacatgctataataagtatttaacaattctgtcctgctgtttgacttcagggggaaacgatggtagaatgtttagtagctgagcatacacaggtagctagagatctggtatacagtaaatgtggtgtggtgtggtatttgggttatatatgctaattatttcagcacaatgctgaaaccatgcagaatacctcttggaagagtgtttgacaagatgccagaaaggccgtgttaattataagtttattgtgcctattcaggttttttgggtgtgttttgttccccactgttgttttattctttatgatggttctctgaaaactatgccccatgaacatatggagttctatatatgcgtgtttattggttttatagaaacctcaggatcctatgagcttaataacgatttacgctgttatgtgggtaattgagaggacctgttaagatatagttgatagtaaggttttcgttagttatttcaactttttgaggtaatattaaaggcagtttgaccaaaatcggaattcaacaatccagggagcttttggtttgctctgggttcactctgggtttaaagacagtttggtttggctacagctgacctccctccctgtttttatgaactagtcttcttcctgcaaaactcaaatacagtacttggtatggtctcataataaatttagttgttaattatatatatatatatatatatatatatatatatatatatatatatatatagtttatatttctgctgttattcactgctttttaaaatttttgcttctgataatgtattaaattatagccataacatatttatatgcctgctaaaatgtaacagttgttggttgtgataagcttttgttttgttttgttctgttttgtttgacacagggtctcgctctgtcacccaggctggagtgcagcggtgcagtcaaagttcactgcagcctccacctccaggctcaagctatcctcccacctcagcctcccaagtagctgcaccaccacactcggctaattttttattatttttgtagagatggagtctccctacattgcccaggctggtcttgaactcctgggctcaagcgatctgcctgccttgatctcccgaagtgctgggattacaggcatgagccactgtgcccagccaagcttttgtttaattttagttactgaagaagcttataactcattgagatatttatgaagtgctttgtgtttgtgtttttttttaggacatgtctcaggaaggctatggaactagatctcaacctcctctggcccccggaaaacctaaccatgaagacttgaacttaatacagcaagaaagaccatcaagtttaccagtaagacattattgtgctgatttggaaatgtaatgagttaaagacttttagaaagagctgttgtttttgtttgttctactttatattatgacatgattgagaagtttctagacttcaggtttattttgtggtcaatttttcaaggtttaccttttaggagctctgtagtcctggataagtctatttcatgtgtatatatctctgttgcagagtgtagacatcagttggaaggttttatgcggctggtcgattttgtgtgcaggtggttattgctgttgtacagttgagctttctttaggctgttgctttttggcagcgatacagaacagaggtgtccttagaggagtcaaaacttaaaagaaatttgcactttgcaaaggatacaaatgatgagataaaatacctgatagtaatttgaatttcttctaggactttctatttatgtaatgagaaatcacccaaaagaaggtagtttgaaatttgaggccagacgcggtggctcacgcctgtaatcccagctctttgggaggccaaggtgggcggatcacttgaggtcgggagttcaagaccagcctgaccaacatggagaaaccctatctctactaaaaatacaaaattagccaggtgtggtggtgcctgcctgtaatcccagctactcggaatgctgaggcaggagaatcgcttgaacccaggaggcagaggttgtggtgagccgagatcacgccattgcacttcagcctgggcaacaagagcgaaacttcatctcaaaaaaaaaaaaaaaaaaattgacaaagctgtttatttccaccaataaatagtatatggtgattggggtttctatttataagagtagtggctattatatggggtatcatgttgatgctcataaatagttcatatctacttaatttgccttcttttatagagaacctaatttaaaggaagtcttctttattaactaaaagaataaatctgcaggaggctgaggcaggagaatcacttgaacccaggaggcggaggttgcagtgagccgagattgcaccactgcactccagtctgggaaacagagcgagactccatctcaaaaaaaaaaaaaaaaaaaagaataaatctataccaataaatatttttacatttatttgaagaattgttgtcattgcctagtttctatggagaaggtttgttttaagatgggaattcagtatagccatgattttaattggaatttcaactatgtttgcattaacttagatttattacttctaaacatttgagaacagacatttgtagtgaatgttaaacatgacatttgacatgcgtaccataccatatacattttaatgtatatgcagatttagagaaggtaagtgatgaccacaggatgtctactgtctttgaatctgatggatatatttttgaaactctaatttttataccttttacttttatgtgagagagggtgaaatcttattgtggtgtttttccccccccctttagtagtgttaatgtatttgttgtctaggtatttggttttgaaggagggaaataggtaatggattttgtgttgtatgctgctaaactttctgtagcagatagttcgcagcttggtaagcatgtagtgtgtacgtgtgtgagagagagagaaggagagagacagaggcatgcatgctgtcgataaatactacatttgccaagtatttggaaattagcttttgtggttctatgaaatttaaatagatgcatgggaagcaggtaaacagtgaattccacttttttcagcagttttttagtggttttggagaggttcgaccttgtagatttgtcattggctgatgattttgtactgtgacacaggttggtaaatttgtcataaatggatgcagattttctgcatagctataaaaatagtttgtggtaaactgctttcttcatatctactcagaaacttcagcatcactcactagtgcgtgccttttgccatggatctgtgttggattggatggttgacattcagctaactctacagtgttattagggatggcatgaagtattgtagtttcagataactgactgaagagtttggtctgggataggagcttttaagttgattgctggaagagtggatgaaggcatttaggagatgaacgaatatagtcatcaactgtttaaatgttttctgaattgttctatttctgtcttgttatgtatgtataacagctatcttccttaacctttatcttgcctacttcccaaaagtatttaaagttgtccataatgtaagttttttttttaatgaaataccccaattggtattttctttccgtttttgtaactcacagataaataagatgctggttgactcaatagtacttcaaacacatttcaataatctttagagagcagagtttccaggttttatgttaagtatgtagaagattcagttactgaataaaggacaaactgtaagataacctgctacacctaaaacccccaatctgttaggatgaaatttggctgtagttaaatgaaatttattgcaccacttttttttttttccacgagggctttgcatgtgtaaaaactttctgtatggggcttacaaatattttaatttatgtggatacttataataagttgcacacagctaaggtcattgtggtttcagggaatgatttgttgatactctgttacggctctaatagtctgtattttacaatgttacttttattagatactgtagtcctctaacttggctgggttgattctggagagcccatgaagctgtatttgttatcacatctgaatttgctgttggatcctttgtagatttactgttgtgctatggttttccttttcaggtgtcagggatataaattttgtcttttcacctacagtcaatccatgatatttgaaacctgtagttttgtaatttggaattaagtatattgtgttatctgtaccatttatgaaatgcaacatagtgattctaatgtgtaattattctgttcattttatgtaatgacgatgacaagaatgcctctcaagtagtaatttcttagtctttttgcttacagataggtttgtaatgtttctgcatgtgatattttctacctgtatcctaagtagatttttctttagcatgtttgttacaatgtaacaactttgcattataagaaatcaaggcatttccaatatctttatgctacatctatactttgatccctcagcaagttgtcctcactgttgtgtgaacctgtttttctatatttgcatgccattaaattcttgatgaccttcagtaggcaatgcagttatgttttccagctaacttagatagaccttcacatcatctgcagaaggcaaatgattgataaattaataacttgttctctcgttatcttggagccatgaccagtcatatttactttttgcttagtggactcagacctaagcactgaacaaatcctccttaatatcgtccacttatttctatacctcttagtcgtacagcatttccctgtttagttgtattagtttatacatccttggtattactgttattgataaatcttaacattgaagagctctctttcttagactattatcacttaaaatttgagcacatttagctttcacgacctctaatattggtatgaaataaacctagcatttaagctaaagacacagtggaatgtctaaaagatgctgtcagttacttattttcttgtttcataaacattggatatccctcaatttatattccaagatagccctcaaatatgatttaatacactttttgttgagtgttctgttaaattttcacctcttgtggcatttattatttatccttttattatagttatcctgaacattgtcttcgctcccctatttcactagaagcttttcatggtatttattatgtcctattcagtaaatattttcctcaaaaatttctataaaaattattttaaaataaattatttcctcattttcagaattttcttttaattgctaagggatctgttaggtggcattgaatggctctcggggcacctgtgctctctgtgctggtgctgctgagtgattaaatgggtggatgtctgcatcgccaggtgggtgttattcttaaaatgattctattttaccaagtgacatttggatttactttggtaaccatagctttaggaaaagaagtggacactttggataattaagctaaaaataccctaaaagcattctgttcttagtaatacatcttttttacttataaaaaattaattgacagaaatggtaatcataagttcagtaattatattacagatgggtagttaataaaatattcgtaaacatgtataaagggaagtaaacatgaaaaaggaaaaagttttattttcttataaaacactatataagcactttcttatagtgcttttccctccagggatctgaagagttgttaatattcctcagtttaaaaataactaatttgttttattcttcagagaggcatgctgctagctttgtatttcagataggaggttcattattctgtttacctaagatatagaatacaatcagtttggaatacaatcagtttggcagtcatactctaagagcgtttgaaaatggactgctttgttaggactttgtgaaatatttctataaatattggctgttctagaaggctcatcaggtcattaaaaacctctttgtgaccctttcttccttaaataggaaatatctaaagaggttggcatgaaaacggtttgatctttctgagttaactaaaaatccctgaatgtgttgaatagtgcttatggcacttttgttgagtttgcaattagacggaaatattgggctttagataaaacatatgttttttggctctttgtgaaaggaaggaggtagtaaatgctggtcgttctttgaaatagagggtgttaaacaggatattggaagcctgaaagagaatggttggaaaacttttattaccaagaatattcttggggcttggctattagccgcagagcatgcagcgttctgcctttaattcaagaagaatactctgtttgtgttggtttttgtttcttaatctttaatgacacttacgttggttagtggcaaaaggtcatgtgttttggaagcatgtttgaatattgctgacattcatatggatgttctaagcatgtagatttgataatactgtgaatgattggaaactaccgggaaaagctttttaactgggttcagctttttgctagttctcagtccaacccagctagaaatgtaaattgctaagaccatctgaacctgtgagctggcaggttttggcaaaagttaaaatctaccaggtaagaattaggtgtatggctattgaatgaagtattttgaaacctttttatttgaggttgatttaaatggttgtcattaaaaggttaagagtggagctgtcttccgttgattgatccttctcaaatccttatgaacattaaaaaaattataagttaatgaaggaaaacccatatctgtcatcaggcttatctcagtgttcaggcatggatgatgcctgtgtgttgctgaagacttaagctgtttattatcagtattctcaaaatgttattaggctatgttgagttttagagtttcagagaaaatactttataaaatggaagcctcctgtgccagggaggaagaggaggttctctgaaggatggtgccctgtcccccagaacagctacaggcataccttatcatctgcatcgtttcaaaaccaaaggtacagatgcattttgatgtcttggggaagttttaaagggaacatgcaatacttcagcttcttaggattcatcaagttcttgaacataattttcatcactggtctgttctatctggagatatcagttatttttggattaagattaagagcatttcaggaccttgctggaaaacctgaatttagaaaatatgatagtgactctgacagatgtttattttccaaaatggattatttctttaggatgtgatatcctgtgattttattccctaggatattttcatgatattgatagtcattttgaaaatagaggataatgcttgaacttgaacaaggtaggaagcaggaaggtatgtctgtctccttctttcaaaacaatcttccatttaaatatttgttctgtaaatgaaaattcaataaaaccttaacagtttggaattcttccaggaaaaaacaggctaaatataatggaaagtctgaataaattaatattgagaaagaactatagtttgcttttaaataattcagatgtttgtgtgcaaagtgtttctaagttgacatactcagttcccgttaaaataaaattctgaattcgtcatagctgagatatttgcttagtggtaatgttttaattttaagaatttgtttaattttttaaaatacatttcaactaagcatgcccctgaaaactttttcatatagtattctgaagatttccatttaaaatatgggggaaatgaatttcaacccattttataggagtgtcaattagttcctaaaaaattaatgaaggagtatgaaggagtactataaaaaaatagacactagacaaaattggagattaagagaggctgaagcataactgatttgcaggatattggttttgataatagaaggataaggatgatctatagttgataaatgaggctcattaagtaagagatgataaatgcagatattcctggctaatagaaaagtcagcatacaaattttgccataacaagtgagggatgggcaggctttgaccagcttgcagctcttccagtgacctctgtgaggccacggagctcttctgtggtctggatgcctgggccacagaggcagcgtggaccccatgggcctcaggccagcagaagggggagccagagtgggtctcagggagtctagagccacctagagcagagcttacaaggagctccacaatggtgcagaggccagggcaggactgcagctcctgcaagtgtaactttttattttttatgctaaaaagaaaaaaaaaaaaacacatgactctaatgttctgaggtccctcttctcaccctagcctgcacttctggttttggcatggcagtgcctgccatgttgggctagatgccaccatcttcacccacccatcctcctcctcctattgcttctcctgggcattgggatctgctgcctccagctcctgcaggcaatggccagtgtgaggcgttgaatgcattctactttatattatccaagttaggtgggaaatagcttttaatttacagattttcacttcgcaggtaactctgaaggcacacatctgttttatataacaagggatatataaccagcaggagctcatagtagcatttgtagactggttatttgcttttatgtttctttgggactggaagtaacaatttttaatgttaactgtcagtttaggagaggaaataaatacatgtagagaaggttctacctgagccaaaatttcccattcttccctcacaatgtaggattttagaggtgtctctcttgttttctcatctttttcttttgccttctctaaattgttgtaaaataactgaatggtcttgttttcctttgtttgggtcaagaaattttagcggaaaattgttactgtgtgaaagaagattattgactcaacaagccttcaattttccgtgaataacactcccaccccctagcttcaggaacatgccgtgcgtgcattctattttaaaatatagactgtaatttaaaacaggcattttgatgccccactgaactttgtttaagcctggaataaaagaggagaaaaaagctgtaagccacaaaaaagtgactaagctttctcaactacttttcttcataatgcattctttaaaaaaaaaaaaaaagcatgttggtacgattgtctctttccacaggaccgaaattgtacccaattttagatcatggtgtgcacatctttctacttggttcgtgattgagataccatttacatttttcagtgcacaggtttgtatttgttgctgtctgtatgcatgcatctgtgcatatggtacgtgttcattgcatgtgagaatattctaaaattacgtatatcatttttagcactcacttactaatagctaattttttagagctcttgatttaacctgattattagactgaaatgaaataaatatttaactacaattttatttaccatcgggtcattgtaaaaattgtgatttgaaagtagtttatattacttgccttttttcctcctcacaaaaatgaaaataaacagcttataatgacttgtatggaagaaacaattgctttactgtttttataaaataatatgttttggctgggagacctattctaatcgccacactgaatgccaacagggcagactctcagctaaggttctggccttgagcaatacacgtcatttctcagagcttctgtttctttgaaaaatgagtaagttagatttaggaaactctagcaccttctagctccaaaattttacattaaaagccatctttgttagtgtatgagaaaaagcactgataaaaacgggccctttgcatttgggaaaaagtcagtggagtgagtaaagtgcgggtacattgaaatcttcagaaacggctcctgtgtgctgcttggtggcctctcttccattctccgatgccatttgcttttgtagcagggacacttgaacttattgagggatttggggttgccttactgagtatataatcttactatgcaggccattggagagccgcagaccttcctgtggtctccctcttcttgttcatcctagagattccagaggtcctccttcctctcctgtatgatcagtttgggagccgtgatgtcgttgcatatagggaagtctagggaaaaggaaaaaacttcatgggaaagggaagggggaggcagaacaaccaaccagccaaccaaataaatgaaaaagctgcaggacgccgaaatctttgtaatgcaaaggctaatgccaaccggatggttttctgaaccaagttgatcatgtggcagttgcttttcatttcttggtgggggaaggaaggccctaagggcatgtatctgaggcctcccttcacctccaaacctcaggtttacatttgttatactaaaaagtcattcataaacacactatgctttttaaaccgagattgacatgaatggaagtagtagcaacccagagacatgaaaaaccactgttcgtctttaatgaaacccaagctgttttcctggagaatgcctcctgcatcccctgcaagctttttcttcttcttcttctttttcttttcctttttttttttttttgagacggagtctcgctgtgtcgcccaggctggagtgtagtggctcgatctcggctcactgcaacctctgcctcccaggttcctgccattctcctgcctcagcctcccgagtagctgggactacaggcacttgccaccaagtcgggctaatttttttgtatatttttttttttttttagtagagacggggtttcaccatgttagccaggatggtcttgatctcctgaccttgtgatccgcccgcctctgccacccaaagtactgggatgaccggtgtgagcccccgcatccggctttttttttttttttttttttttttttttttttttgtgagtgtttagagctcactggttttgatctgggtagagtggtgtgttacagttctcatttttacttgttttctcactgctctttctgtcagagcacaaaatggtatgcactgaggcagtggcagaagccatgtccgctcctcaggcagatgtcctctctaaagcaggccacagtgagcctggggaccaccgagtgtgctgcggcctcctggcacctgtgcctgcagattctttcctgtttttagaatttcctgacttgcgtaggtagggatctccctgagtctttcttttccccatgggcatgggtggttgagctgtgcagtgagtcagtccacacctggggaaaatgtgtagttggtcttttggaattatgctgtacccggaaaaagtttggctttagaatggtaatatgacacttcattcattggacactatttttgaaagtctggttgtatataaatgaaaatagtgtctgggcatggtggcccagcactttggaaagccatgagtgggcagatttcttgagcctaggagcttgagaccggcctggccaacatggtgaaaccccatcttcactaaaaatacaaaaattacctgggtgtggtagggcatgcctgtggtctgaactactttgtgaggccgatgtgggaggatggcttgagcctgagagatggaggctgcagtgagcagtgatcacgtcactgtactccagcctgggcaacagagcaagaccctgtctcaacaacgacaaaggtgaaaatattagttaatggacactagaa

SEQ ID NO: 144 - DNA, 1056 bp, Homo sapiens
atgggcttgggcaaggacatgggcgcccagtacgccgctgccagcccggcctgggcggccgcgcaacaaaggagtcacccggcgatgagccccggcacccccggaccgaccatgggcagatcccagggcagcccaatggatccaatggtgatgaagagacctcagttgtatggcatgggcagtaaccctcattctcagcctcagcagagcagtccgtacccaggaggttcctatggccctccaggcccacagcggtatccaattggcatccagggtcggactcccggggccatggccggaatgcagtaccctcagcagcagatgccacctcagtatggacagcaaggtgtgagtggttactgccagcagggccaacagccatattacagccagcagccgcagcccccgcacctcccaccccaggcgcagtatctgccgtcccagtcccagcagaggtaccagccgcagcaggacatgtctcaggaaggctatggaactagatctcaacctcctctggcccccggaaaacctaaccatgaagacttgaacttaatacagcaagaaagaccatcaagtttaccagtaagacattattgtgctgatttggaaatgtaatgagttaaagacttttagaaagagctgttgtttttgtttgttctactttatattatgacatgattgagaagtttctagacttcaggtttattttgtggtcaatttttcaaggtttaccttttaggagctctgtagtcctggataagtctatttcatgtgtatatatctctgttgcagagtgtagacatcagttggaaggttttatgcggctggtcgattttgtgtgcaggtggttattgctgttgtacagttgagctttctttaggctgttgctttttggcagcgatacagaacagaggtgtccttagaggagtcaaaacttaaaagaaatttgcactttgcaaaggatacaaatgatgagataaaatacctgatagtaatttgaatttcttctaggactttctatttatgtaatgagaaatcacccaaaagaaggtagtt

SEQ ID NO: 145 - protein, 202 aa, Homo sapiens
MGLGKDMGAQYAADAWAAAQQRSHPAMSPGTPGPTMGRSQGSPMDPMVMKRPQLYGMGSNPHSQPQQSSPYPGGSYGPPGPQRYPIGIQGRTPGAMAGMQYPQQQMPPQYGQQGVSGYCQQGQQPYYSQQPQPPHLPPQAQYLPSQSQQRYQPQQDMSQEGYGTRSQPPLAPGKPNHEDLNLIQQERPSSLPVRHYCADLEM

SEQ ID NO: 146 - DNA, 39700 bp, Mus musculus
ttaggaggcgtggccttgttggaataggtgtgtcactgtgtgcacaggcttaagaccctcatcctatctgtctggaatcgagtcttcagatgacgatgtagaactttcagctttatgtgcaccatgcctgtctacatgttgccatgctcccaccttgatgataatggacctctgaacctgtaagccagtcccaaatatatgttgccctttataagactcgccttggtcatggtatctgtttacaacaataaaaccctaactaatcaatcttgtctatcaaaaaaccttaagttatacagaggtaggaaaacatgtaataaactttttgtacttatagccaacaattatttctgacccatcttttaccacccatcccaactcttccactgcattattgaagtagatacaagtatgtcactaggtatgcttcaggatccaaatgggatattctgttttccaacttcatgctgggtgttcactacaatgtgagtgtatataaacttagtttattatatggatttctacatttagagggccacatatatagtaggtatttaataaaatacaagtcacagagctgaggacacagcttagtgggcagctcttccctagagtggttagggtcctaggttcaaactccaataccaatactgcaaaaacaggaaaatcaaacaaaatgaaaacatcccagaataaactttttctatgcatttaacattcaagatacgcatggtatatacccatcttgttgatattgagaaacaagcacaatataagttttctcaccaacatttaggaaatattttctgtttatctcatacagtatgaaatgcatgaaaatgggtctgaccttgggattatattcagcatttcttgcacgaagtgcaatggtctttaggtcaagtttacagccaagattcacggtagatacaatatttctgcaagaaatttgaaaacatgattactgaaaatacataacttttaaacaacgaaggcaatgtctttaggtaaaatttacaaccaagattttctatgaatataatatttctgcaagaaatttgaaaagaaaatatgattaagattaattgataattcattgttttttcaccaagctttaatttaaaaaaacataataaaactctgctgactttagtccaaaaagtgctccataccagatattctcacttatactcaaaatgtcctatgaggtgttaactactcctcccatattcagacaaagcggctgagcctcgagggaatgtactagctttggcttgggatgcacatgataactagccagcttagccaaaccagcacatttcatgctagtgacaaatcccatcttaaaaaccagggtgtgaagccgggcagtggtggcgcacgcctttaatcccgaggcagagacaggcaaatttctgagttcgaggccagcctggtctacagagtgagttccaggctagccagagctatacctgactcaaaaaacaaaaacaaacaaaagaaaaaaattaaaaaataaaaaccagggtgggtagtgtcctgagaaagaacacttcagactctctactgacacacagagggtgcatgtacacacacacaaacatcaccattttccacccaggtctaaaggactgtttcatgacactatatcccgctcttcaagttgtctatgaaatactttgttttccatcttgagaccaggtttctctatgtagccctggccatactggaacttgctctgtagaccaggttgtcctggaacacacagaggtctgcctgcccctgcttcttcagtgctgggattaaaggcatgtgcttccaccacctggcctagaacttttaataaaaactgaaacatagcaaactcaactttttctgtagttttctaggtctttcaaagtagacagacctgaaatgaacaatgccatcaaatgcaattaatagaccatcaactgttacacaagaactccagacaaccagctctagttcattgttgctccctgctctctttttactctctacaaagaatacttttgaaatcttgtgactcaaagtcttgctgaacagcaaggcaacacggtgggaggcttaggcaggagtattctcaagaattcaaagcagctagcttatattccatagacagcaccaccctagccagctttatcacgtgagacagtctcaaaaaaacccccaaaaatttaatttaaaaattaaattttactggactagttttctctagtacataatcagaaagtgaggtagatcaaatgttttcaattttccaatatctatttccccccaacctaagaaatactaagaaaaattcttgttttacttaaaaatgggtttgactcagcatgcccatacgtgaagtgaattttcaggtacactttggtgcgcctgtcacaaatttagccatgcaaatgataaatgtgttattttagaaagttaaatattgggaagggggtaacatttggaatgtagataataaaataataaatttaaaaaaaagttaaatatttacctgaattctttataaggctgctgaactgacacctaataaggaatgtttttagataatggaaacagtaatgtggttgattgcatgctctgtggatatggaaaaaagtgtatgtcctaagctgactctcacaaatgattttaatcagaagtatgagcctgaatgcctgtggacgtcaaacaggcataaagaaatagtttacaacagtacaaacaaaaggagtgcttatagggcttatctctttaaactcaaaagtcaccttaaaattgtgtacagccaaggtagaatcaggttatgccacttagcttaaaaatgaggtggcatggcttacaaatgacgatatatatgcagaaagctaagtgtaaataggaaacaacgctgaaagtaggaaggtggagttactaaacacaaaacccaaatagtgttgtctgcaaagaactctttaatcagcctttaagctttcttaaagtaaagctagattcttgttactaaatggtatctggaaagtttgggctgtttgaggaagaaaaaagcctgaatctcccaccttttttacatgtgggaaatactttacttaggcagaaaaattcatcaagataagaactgctatccctactctgagagtgacatagatctccaaagatataaatacagccctcacagccaaaactgaagaaaatcctggacccctaagacctgtgctgatacagtcaaagctgtgatccaactggccagtgactcagccaattagctacaaggaaatgtccacagtatcactgaagctcagtttgcatttctgtggcccgaatacacaaacacaagcaactccatttctaagggaaagtctctgctgagagtactgacccactctgtagcttcaattcctacaagaacagataaagtcacagtataacagaattaccactgggccacttccttaagtaaatccagtgtctggaagcaaacagtacaataacactgagcgcctcctttggtgcagagacaaagggcaggggacagaggacaaggaacacaacagaaaacgcatgaatacatacgcgcatgcactcactgttacacacaggggctggggtggtgtgagaggtactcactgaagctgcggtacaattccagagctctcagaagctggtgtggcaggagtgataggggtcataggagtcattggtgaagggtacaagggggtggtgcctggcaacggtgcagtggtcagagtttgagaatggaagagttgtggggtctggcctgaggcaccctgtgtgggttgctgagatgttgattgctgtactgaggctgctgcagttgctactgcctgctgttgttgctgctgctgttgctgttgctgctgctgtctttgttgctcttccaaaatagagagactgttggtgttctgaataggctgtggagtaagtcctgtgccgtaaggcatcattggactaaagatgggaattccaggagtcatggcgccctgtggaaagcaaagagagcaatgattaagatactgatggtgagtaatttaggtttttccctagtgaaacccaagtaaagtaaaaagactaatgttttctgaatataataggtcattaaatactagggaagaatttgtatcctgagatgcacaactatcttctgtagtactgaccatagaagatgaacacttaggatttgaaaatgttatttatgatatgcaaggaagatgtttagcctctcatgtgtatctagaccataaagaaaaaagcctatgtcccaatttaaagtactgcccagtacccaggcatggtggcacgtctttaatcctagctctggaggcagaggcaagtggatctctgtgagtttgaagctagcctgatttacaacgcaagtttgagggatgttgttacatagagaaaccctgtctcaaccccacccccacccacaaagtactatttaatatatgatgattatccactgactaagcacgtgtcagttttggacgacggatcacatggatgatggatgacagactcatggatgcctctatcatactatttaataaaaagtaatttattctactaaaaacaaaaatcaacaaagtctgtaaaatactgccaactgccttttctataatgcttctatgtcttacatatatttaattataattaaacattttatttataaaaataaagtagaactaattatttatgtggaggcagaagaacactggagatggtaaaatgtatatggaattggtaacaatctaggtctaattctattgcaaacacatacacacatacgtgcacatgtttagcatcaaaaccaatgtttaattttgaaagcagatttggtagtaatcaggataggaaagtgactgcaacaggagcaataaatttatttattggagtaaataagataaatgctctacagctcatagagagtcttctaattaattaggttccaactaaacttcccaaacaaaagaacatcacagctatctaactcagaaatcttcacaaagtaaaacaagcttaaaaacctaaaaatccacgttcactactgcatggtaaatgtcactgtcttttgctttctcttaaagggaatatgagccctctctgcccctccctcttgctctattacctgtggggaggccaagccctgagcataaggtggaaggctgttgttctggtccatgattctccctttcttcagtactcagatcttccctagagcatcctctgaatatctccttagaaacgtcttcaatgttctgggttatcttcacacaccatgaaatagtgatgctgcttggaaaaatatgttttaagtttaatagatggacataggtttcatgttcacacaaaataaacacagaactattttggagtgtgtgtgtaaatacatacacacacacaaacatatgaatatatgtatcttttactctcaaagcctagtccatgtttcctgtgactcatgtaaaatcaccaacaaagacaaaacctttgttgctgtgtgcttaaatattctaatagtactgaaaattaaggtgtcaagaccagtaataaaaactattggagaaagggctggcaagaaacggtgcatcaggcaaaggcgtttgctgctaatcctaatattgtgcatttatccaaatggtgaaaggagagaacaaactctcacagccaattcttcacataaatgtaattcattttatatgtgtattttgtctacatatatgcctgtacatcactttcatgccttggtgccttccgaggccagaagagaaggtcagatgccctggaattgagctaccatggggtcatatgtatccttaaaataaacatgggtctttggatatacaacttgtaactttgaaacctgtgtgttctttgtgaatttagacaataaatatttagattaagataaaattgtagccaggcagtggtggcctttaatctcagcacttgggaggcagagtcaggcggatttctgagttcaaggccagcctgatctacagagtgagttccaggaaggccagggctacacagagacaccctgtctcaaaaaaacaaaacaaacaaacaaacaaacaaaaatcaaatttagggtgtgagagatggctccaacctggttctctagaagagttggcagtgctcgtaacctctgagccatctctcacagcatcaggggccagccctttgtacaacctccaccctcacttcccaccccccaccccccagcaaaggacttgaggttgggggaaagaattcctaaacaaactatactgttagaagagaacacttatcggcatgatttgcacagtctattaggtcacttcttgattttaaatatgctgctcagttttataccattcacaatacctcaagcataaagcgccatacatattgaactggacacaatatgctttaggtagttgtttgtgtttcaattaaaggcagactaaacaaaagatgaaacattatctcatcagagcatattaatgaaaactatgcctagaactgggtttctttaatcatcatctctttcgaggtcatggacatgaaatatgaataaagactaagagactatgaaatgtgttgtttttcctttgtaatggtagtagtgatagaacccagatcctcctaaatggtaggcaaaggcccaccctcaattttttaaagatgcttaaaaaaaaaaaaaaaaaaaaaaaactgcaggcatttactaagcaaggcaaaatgttgaaaagctgaaacctaggacaggacttggcatttgtgctcatgaatggatgctatggaagagagaatacaaactaaagtcaaggggctagagagctgttctgcgattaagagcactgttgctcttcagagggactgggtttgattatcttagcacccacatggctactcacaactagctgtaaatccagtcctggggagtccaatgctctcttttgtcttccatgggcccggacaagcatgtggtgcacatatagacagataagcaaaacattcacatatgtaaatcttttaaaaagttaagaaagacataactaaagtcaagtaccttctgagaggccggaactcgcacaaagcaggggcaatgtaacacaggtctagcaaaaggagcaaaaggaacaaaacaacacaaatcagcactctaggtgcagcacaaatcacagaagggaaagggggggacaaagccttggaagagcatgcagtgtgtgacaggctcagtatgtaaagtcactacaaaagatgacaaagcagctgtaggtggggttgcataattcagaatgtaagatgtcattacacaggcaatggaaacagttaaggattttaaggtgcagtttgagtatctcctgtgtcaaagagcagataaatctgagaaaattgaagactgaaaattcaatttcaatcactgctttggttgaggaaaaaaaaaaaagttggatttcatgtccaaagtataaccagttatttatccagatctctttctgcaaacgaagtttactgaacgcttgattatatagactggggaatttgttgtacgcttcgcagaagtcatttcacacctgcagacgatataaaccaccttttctcgtctgcaatcttaaaatcgcaataatcgctgcacaaacttatttttaggctgttttctgggttttcatcttttggaaactgagccatcaaactgagtatttgggaaaccgattccgcacagtcttcaagcgtctgcctaaccggtccggcatctttttccagagaagcctacccggagttttggaaaaccaccttaacttgaggctaaagaccgacagtgtgtaaataaagcagcatgcgtttttatgttaatctcgattagcttgactctcaggcttctggcgagatgctgagtctcgagaaccgcttcctaacagaattattcttactggggacaaaacgggcggctgcaggcctgggtaaaactctcccaccgggggaagcggctgagacgtgcggtgcgcggggctgtccggtgccagcccctcggagacgctcacccttggtactgggtttcaggaccccgccgaggcgatggtccagagactggttactcgcggagccgccgcagcgcgcgcggaggaccgttcccagcccggccgcgcgcccactcgcgtctcctccggcaaactccggggacccgctgcagaagtcgcctttattaaggcctccaagcagagaaaaggatgaaaggaccgttacctgggcactgcggagaaaatgacgcgaccgcagaaacctagccaaaccgccagcagatacccgccaccgctaccggactcgatccaccgaacgcctgacgcacatctgatgccgtcacttccgccagttgcgctcttgactgcagtccgatttgttgtgcttaagctgtgagacactgggaaggaaacgagcgggccgggtaccagcagttccggggcggggcctccgacggccctttctagctgtcaaagagagatctattgagtgtgtagcggaaacagttggggatgtggcaatggcgatcaagcccaagcaagcgttctaccactgaactacatcctcagtcttccatgatttgtttttgtgagaaagagtttctctgtgtagccccgactttcttgggactcactctgtagaactggctggcttcgaactccagagattgcttggcaagcttactggctcctcccctttgagatttgtgaggtggctaaggaaaatgtcaagcaaacgctcctcatcatgttctcagtagatgttaacttacgttcaaggaagaacaacaaaacaagcgactttgtagtcacagattcatttctatttttagctcggtcactaccagctctcttccttgctgccacaagaaaacgtcagctgtttcttaggctgcttcataatgcttgattgattccaacatatcttaatttttttttccttctgaagttcatctaaggcatatacatgtgttgttctgcgtacttcctttcccttgtattttgcattatcaacgaggtaatgagctcctttaggttaaggttagcgctctctctctctctctttctctctgtgtgtgtgtctgtgtgtgtgatggacagtatctgtgtgttatgtgtgtaggtgttgtataggttgtctatttacacagactctaataagtacaatagtactgtgtatctattttcccctaaaggaaacattttctcttgaaagtacaggaaacctcagaagactggggaattgagaaaacttaacaaaggcttgtcaagaggcaatataagggaagcgggttttatgttgtcttactgtttgaggagatacaacccagggggaagcatgccaactggattgcatccacagaccagaaacataaatagataaatgttagttcgcttcttctttatttagtcgggaaatccaggcaatgaggtggcgccgcttatattttagttgggtcttcgctcctcaattaaaccttgaaacacccgcatagacgcatccatgggttttacctacatgatgctaagttctgtgaaattaacaatattaaccatcatattctggctaaagaaatctggtattgcttcctgggtctcgtggctgcgtacaccacacagttgacatgcgtcctgattggccttgaatgcagcatgaactactaacccgtctcaaacgctgtgccacttcgccaatgtgacatccgagttgtcgttgctctgtaattgggttaatttttttggtatggtcagacttttaattttctatccgccatgagtaaatccaaacgttttcttagggttataaaacaggtttctctgttggcaggattggcggatccaggttgtgcgctagccggacgcaggcgtagacctccaagagcaacgacgagtgcaggctagaggagcctaggggggcggggcgagggaggcggaagtggaccggtcccggcggccattttgccgtgagacagcaggagttaggcgcgatgctttccactgctgcttaccgagacgtggaacgagagctgggaatggggcctcacggctccgccggccctgtgcagctgcggttttcgccttatgccttcaacggagggtaaaagcctgggcctgctgccctcacctgggtcgagcctggggtcgcgacgggcgggtgtgggaatggcagggatgtagcctgcagcccagcactcagttgtgcatggacgccctcggtgccgtttgctccagcaaccgggctcccacctcaatcttccgccctatggcctgttgtttggtagggcttgaacacgtttctaaagccaacgggcgaacatgaagttatgatttgtcttggttgttagacgagtagctgtttctgtcgctgggccgcctgatcacttgttgttttaagaggaaactaacatgattaaccagacttaatttcagggatgaaagtgaaggttgttttgttctgctcttgagacgtagcctgctgggcaaggtctactgagctgcatccacagccttaggcagtcggacccttgtgtgtgtttatttttactctcaaattactttagcattttaattatccgctttattcgaagatatttttcctttgtatttaggaccgttgacaatacaggggtattcttcatcaaattagaagttgaaacagctaattatccaaaaaaggggggcggggggggggcttgtttaagaaaagcaaaaccagccaggcggtggtggagcacgcctttactgctagcaaaggcaagtgggtctcttaagttcgtggccagtctggtctacagagcaagttccaggacagcctgggctacacggagaatctttgtctcaagaaagaaaagcaaaaacgttaaatatggctttatgaatgttgagcgttgatcatacagatagtgaaaggttgattttagtcttggttgtaccttttgaagagcaattgtgaatgtactatgtgggctcctttcagttacttatagattggggaagactcaaggtaggtttttttgtttgtttgtttgtttgttttaatttcaagcagttaagtgaataatttcatagttttacttcttgactcttggcatctaaacagcccaggctatagagctggtgtgaattagaaccggatttaaattcatagcgttctcagccgagtccagtttcagtttgcttttccagtatgctgcttaatgctgcacgtgaacactaagtacttactttgtaagatgtgttaatttcaaggtgttccgaatgcagtactcatgagtcactttttttaacctcctttacttcttcttatccatcactttgttcatagttacttacacctatccattaaatcacttttctcttttgtgccttttagcatttattgcaactagccctgcaagcagcctcagattctacaatatataaatttctctttgtagcttccaggtttttgtcacttgaggcctttatataattactaatcttttataattcctaagtctgtttctgtaactatttctcaaaagtccctgaaattccggcctctttgggaaaccgtatctaaccgagttttctgatctctccataacccatgttagtaaacaaaacaagcagggtaattgttcctttcagttactgctgctccttggaagtcttggctcagtttaaaggggtggggatatgttgttttcctcagcagacacatctagggagttgtaaaaccttggttgcatacattggtgtcgtatttgaatttgcccttcttcctcctgtcatcctgcgttccttctgtcacagcactcttactggagcagtattatgtcccatttcacgtagtactattgggagaattgtattaaaacctcactttgcaagtggaacattctcttttttgttctgtgtaactctgctagaattctaaactccagcttggtgcttggggtcttctacagcagcccatcacatgaggagtttgtatgtctctggtaaccttaattaagttgcttgagtggcctgtggtaatattttttcccttctgttgctgttcatggtatttgtaatgccattcttttttgctttggagttttagtgcaaaacttgcttcagtaaaaatagtaggtaatgttttctggatgtttattttctactaggaaataggcacttacatgaattatgtgtttaattctcacactctataacagaacagggactgtagtaccatcaatttgaacatgagaaatttatccaaagtcacacaactaataagtggcatgaataattccagtgcccaggtgcttagtcatcacatagtgccgtcctactgtgtacacatagtgctgtcttactgtattctacaatggttattgttcacttgctagaagaactggaaagtgtcaggtggattttatagttaactaatttaatccttatatacagcacactaatatgagatagtttctaagtaatctcatattttaaagaaattgaagtttttaagaagtactttgcttgagaaagcaacagtagtatctaggttctacttttgtgttttttctctggtgcccttcagtaagttatcagaaattgtacaggaagaaaagaaaagcttgctttttgactatggtatgacaacttttcctgggaaggcacacacacccacacacacatacatacatacccctacacgatttatgaaacatctacgtgacccttgggttactgcaattgctctgcagttggttaaaatttgattggagaacaatggatttttattgggattactatgtcaggagtgtcgggagatacttagagacgcaaggatgacccagaatcaactgtatcataaaaaagtccactccagaacagttgacaacgtataaaagccgtggctctggatttctgtgcactagtaggtagctcacaatttggaaaatctcttcttacagcttggccagtcagtctccacccccaacagttaagacaatgtctcactatgtaaccttagctgacctagaactcacaaagcctgcctttccctctcaaatactggaattcaaggtgtgtataggcctgtgttgctgttggtgggggtggaaggggctgctccaagtatctcaggagtgtcccctagatataacttggtttctctcaagccttctaccccacaagggatgtttcagttcagaggagactgctgtagacactgacagttcacgtaatgacatattctagcagctcttgggtaagaagatagagatcttctgaactcagcttgcttataggactgttaactatacttggtcttcaagaccacagacaggttgctttgtaatactgcgttagctatacgtgaatgtttttgtgctttaatgatgaaggttttattcagtgtctttcctattacctcttctcagtgaggtactgggacaatatgtcccattttaccttctgtgttccgtagctgagaaacctgaggccttcaggggtttatttgcgcactggcttatagctgcttaatggggagggctccattaggctctaggttagggctcttccaggatgacatgtagtcaggaatccgtttctccagtcttttgtctttcatttgaattctgcttttatgttagtacatttacccaggaatggcctgtaggacacgctaccatttgaagggacagaattgcaaccctgaagagttaatgtttgttctttctttccttaattcgttagtactgtattggcaattgctggagaagatttttccatcgtcgcttcagacactcgattgagtgaaggattttcaattcatacccgagatagccccaaatgctacaaactgtaagtaaatctttctttgttttttgttagagatttacttttattttaagtatatgtttgttgtgtttgtacatatgtttggatactgggaattgaacccacctgggtcctttggaagaatagctagtactcttaaccattgagctatctctccagctcacaagtaaatattcataaagacatttcacttgctttcttggtggcagctgggaagattatccatgtagctaatcacaaaacgaagtggaagtggaaccaacagggcttgagtttttttgcaaagaaggttaaggtgataaggaatagagaataaggaaggcagctttgctgtgtgttggtcctaggcatggtctacatctgccataaaaagcagtgaagttttgtcttccttgttcctggctacccaatttttctaactcattaacagttctttcataaggaaattagaattagactttactagtcatatgttcatatagttttaatttcatatttttttctgtagaagtagtcagacttatgaaacatctatatgatccttgggttactgccccgacctgcgggacagccgaacagggtctgaggaacacctgtggagaaaagggggtggggggcgcgagaaacacaaagaacggacagcaagtcaaaaaaccctgatcaagctgacagattttctttttcccaggcaggttttatacccatagaagcaggctatggggagggggtgacgcagaatcgcttcgtttctgggggaacgcaccagttcccaaaagcaggatattggctaggtaaaaagttcagcaggaggaacagaacagaatgggttgctagatacctgtccacaagatctgtagttatttgttcttaagtgggggtagtactttcccacagaggcctcaactcacagaaatttctcacagaaatctcaactaagctaatacttttccactaaggccaaggcttggtaaataagcacttatggctgacaaggcagttaacattcaaacagggtcgctcctaacagattacatcatacttcaccttctctagtactagattataagtagtaacccttattttccttagcctaatcatagtatatcttcggcccacctaaaattaatttggtgtaaggagatgttggtatgtctgctcccatgccgcaaaagccctggctggttgtcagtttatgagccttgctttatcaactcattctcccgaaactggcttttacaggacagacaagacagtaattggctgcagtggtttccatggagattgtctcactttgacaaagattattgaagcaagattaaaggtaggtgcttttgaacatgtcgctctgttgcaacaattcacagcacagctgcatttagagagacagcaagttagcaggtgcagttagcatatcctagaaataaagcagagccaaccctggctgtggaggtcattcaggtaacaggaaactgcagcacaggttagaggtctgctaaagtctctgtgccttggcagggctgtctactgtatagagggctcttctgaagtgtgtcagatctggctgtggcaaaagacagcctgggcagcgtatagctaggagcaggatttggaactctctgctcaccgttctcctcctccacagccttccactctagtagacagcacaaaaggaggaaaaaataattctggaacgtggtgaatggtggtagcccatcacttggcaggcttcggtggtaggtatgatgtgatagggatgtttttgggggtaggggtgaccacattctctgttgcctactgagttcacttaagggaacataatctcatagtcatggaaagttcacttacatttcctgtggggctgtggagaaattatttcacagtattttagaacgttttgcatagaaagcttcagaaatttacatttattagcagatatatcatgccttctagtagtagttcatattttactataagttatcttagaaattatcctgtatttgtctgcttctagtcatatagctttttgtaatttttcagtgttctgaccttgacttacaattcttaggttttgctttagaaatgcttgttggctgattatgggatggatccccgggtagggtagtctttggatagtccatcctttcatcttagctccaaactttgtctctgtaactcctttcatgggtattttgttccctattctaagtaggaataaaatatccacccgttgctgttccctcctcttgattttcttgtgttttgcaaattgtatcttggtggtctatgtttttgggctcatatctatccaaggagctgaaggggtctgcacccctataggtggaacaacaatatgaactaaccagttacaccccccccccaagctcacatctctagctgcatatgtagtaggaagaaaggccccttggtcttgcaaactttatatgcctcagtacaggggaatgccaaggccaagaagtgggagtgggtgggtaggggagtagggcagggggagggtatagggaactttcaggatagcatttgaaatgtaagtaaagaaaatatttaataaaataaaatatgaagtcagataaaaagaaatgcgtgtcgtggaatccctttaaccccagtcaagagacaggcaggcagatctttgtgagtttgaggccagtctggtctataaagtgagttctaatgcagccaggaaggggttgttacacagaaaaaccctgcctcaaaaagcaaacaacgaaaatgatgaacttaattcattttatactcaaatttttgtggaaatttttatcctgattatataatttcatttattttattcgtatgggggtttgactacacacttgtacaccatgggtgtgcctggtactgggaggttaggaaatggttccagatgacttggaataggccgtgaatggttgtaagctgccatggaggtgcagaaccaaacctaggtttgcaaagcaagtgttcttaactcttctgagcagtccctctagtccccagggtcattctttttatactgttttccttggtagacaatttgagaagtaagactgcttccccttgataatgtggaccccaaatgatgcagtcaactgatttctgtttgtaagatactagatcataaatattttaaaactcaagggccatttcatttctgtcacagctgcccagttggattaagaaggcagcataaacaacttggttatacttgaggagaattttacttgtagaagcaggtagcagcaggtcaagctcctggtgctgataccattgtagtgcatagtgcagaaagagatacatttggaacaccttccccgggctcaccttacatgccctgcgtcttaaattgttgtggaattagtagtgtctgaaaggaagaggggagagtagaaaggctctttaaccccaccttcttgtcattcttcctcctaaaactctttttgttggttggttttaagaccgggtctctatgtagtcatggctgtcctggagtttgatgtgtagaccgggctggtcacaaactcattccttgaatgctgagacaaccgtgtactcactgtaaccactatagaacagaacaacaactcgacaaacaatgagttcactggttatttagaggagcatggtgagggcctacttcccgagcctgagctcctgcgcacagttgcatcatcctgtgcccatccagcatagacgacagttcaggaagcagccttcccctgagtccctcccatcagagtgatagttttcttttctcagcagttgttcatgttgtataaccttgaggaagaccctcttgaattttgttggtttcagctttcctggcatgtgtcaggtttagtcacattccgagttttgctcttcttttccaggaaatgtttgtgatctgaaaaacaagctactgagcatctcaaatatatgtaatgaaatattattttatgttagtaccattgtattatttgatcatgaaagaaataagcttttgtgtttcactaaggaatacctatagtgtgtactggttgttactgaagcttgacagattctgtttctactctactgaatctctctgttgtctccccctccccgccccccaatcctactaaaaataacccatgaagatgtacaagcattccaataacaaggccatgacaacgggggcgattgctgcaatgctgtctaccatcctgtactcacggcgcttcttcccttactatgtttacaacatcattggaggacttgatgaagaaggtaacagcttgctttctggcaaatacaaaagtgttatttcataaatgtgtgtgcttctgcctggagttgtgctatctagcccagcagctttgctctttgatcacgaaagtacaacaaactgaagctaaaagagataaataccactcagtgacatacagcaaggatggtatctggtgcctggtgacctgatagttatttgttttttcaggatctggtattgatagctattttctttcatcttacagattacataacatagttaattcaaatagtcctttttaaaaacatatttttattttatatgcattggtgttttgcctgcatgtatgtctgtgagggtgtgagatcccgtggagatagagttacaggcagttttgggctgccatgtggcttctgggaattatacccaaatcctctggaagaagagtagccactgctcttaactgccaagctatctctccagccccctcaaacagttcttgaaaaggaatttcaggggctggacgaactcgtggttaagagcaattctgctcctacacaaaggcttgaatttagttcccagcaccaacatggtggctctcaaccatttgtaactccagtccggttccaaggggtctgatgccctctggagatctgatctgacctctctctggggatgtcaggtgtgcacgtggtgctcatacagacacccacaaaggtagcccacaacagaccaaagtccagcatagtgaaccaaggagtcttattggggttccttacaggacagtgggtgaggggttccttacaggactgtgggtgaggggttccttacaggactgtgggtgaggggttccttgcaggactgtgggtgaggggttccttgcaggactgtgggtgaggggttccttacaggactgtgggtgaggggttccttacaggactgtgggtgagggattccttgcaggactgtgggtgaggggttccttgcaggactgtgggtgaggggttccttgcaggactgcaggactgtgggtgacgggttccttgcaggactgtgggtgaggggttccttgcaggactgtgggtgaggggttccttacaggactgtgggtgaggggttccttgcaggactgtgggtgacgggttccttgcaggactgtgggtgacgggttccttgcaggactgtgggtgaggggttccttataggactgtgggtttggggttccttacaggactgtgggtgaggggttccttgcaggactgtgggtgaggggttccttacaggactgtgggtgaggggttccttgcaggactgtgggtgaggggttccttgcaggactgtgggtgaggggttccttgcaggactgtgggtgaggggttccttgcaggactgtgggtgaggggttccttgcaggactgtgggtgaggggttccttgcaggactgtgggtgacgggttccttgcaggactgtgggtgacgggttccttgcaggactgtgggtgaggggttccttgcaggactgtgggtgaggggttccttgcaggactgtgggtgaggggttccttgcaggactgtgggtgaggggttccttgcaggactgtgggtgaggggttccttacaggactgtggctgaggggttccttacaggactgtgggtgacgggttacttacagggacagagatgactcaaaggcagctgcatcaccaaagctggaaacttgcagcacacttacagcctgcagggtggacagtgtcccttctagttaggtggtttagttgagcgacacattcccaggctgcatctctcctccttttttgcagcttggcttttcatgaacatgactggtggtaatatttatttactcttgatagaggggggtgggtcttataaatctggtctgtttcaggggcttcctgaagctgttctaagttgttgacttctgtcttagcttccttccctgcaggataaaatgctttaatcaggaaggaaactgctacacagcacattcgtacatttaggcaaaagacagactccttaaggagaaataaatctgttttgttgttgtttaaaacataatattgtaatccgtgcctataacttggcagctgaagtggaagggttgtatcattcatggactattcaagaccctgtcttcaaaaacaaaggtgatttgagtgagttagtacctctagtgctctcagtgtatgtatctttttttatttttttttctgtcagagtaagataggatatattttttaagacttcagctggatctggtggcacatggaatcacagcactcagataggcagaagagcctcttgagtttgaggctagtctggtctacatagccagttttagaacagctaggactgtgtagagagatcccatctcaaaaaaacaaaacaacaacaaaagatttttgcgtgtctgtgtgtttttgctccccagtctcatttttttttagttcctggagaattttgtgcagtgtattttaatcatggtcacccatctcccgttcctcccagatacaccactctctagtttccttaccatccaacttcctagcctctttgttttcatctttaaaccatcaggtacagttgttgttactcatattctcggatgtgtggtcttccactaaaatgtggtcagcctgttaggggactcacccttaaaactgactccctctaccaatccctgtcagttgcctaaagctccttggctagggtggtacttcttgtctacttctctatgctggcatgtttgtctggcttgagcttgcttgggtcttgtatacaaatcacaactgctgtgagttcttgtgtgcaagtgtccctcagtgtccagaaaagagtttctttgtagttaacaccacctcgcgcaatcttttcactcacataaatatgtataatgggggctggagagatggctcagtgttaaagagcaccgactgctcttccgaaggtcctgagttcaaatcccagcaaccacatggtggctcacaaccatctgtaatgagatctgatgccctcttctggtgtgtctgaagacagctacagtgtacttacatataataaataaataaataatgtataatgataactaaatctcaagaaaccgttgtaggggctggagagatggctcagtggttaagagcactgactgctcttccgaaggtcctgagttcaaatcccagcaaccacatggtggctcacaaccatccgttaagagatctgatgcccaataaataaatcttagaaagaaaggaaggaagaaagaaagagaaaaaagaaaccactgtagaagattgactttttcattgtgtgtggagatgtgatatgcatgtaagtaagtgtgtgtgccttaagtgtgtgagaccagatgtgtcagagctgctgtttattagaagctgttgtgagctacccagcaggtgctgggaatccagcactaagtacaaatcttaactactgagccatctctccagcccagatattcgttgttttaggattgaatctaagacgtaagaaaaaaaaatcagtctttaggagtggtggtataaaaacaatgcattatatgcatgtataaaattatcaaagaagtaatttataaaaattatacaaccagtatctacaataacttttttaaaatagcaactttaaagagaaaccagtctgtgtgactggttttctacctggatctttttctacctggatcacagcagggagctcctatgatggaatgtaggtgaaactgagggctttgcctcagggctagtacatttcacccctgcctttcctctctccatggtggatggctcctctgagcctggtacatggtgcctcctggattgtttctgaccatcacaaagaagtcctttaccttgccccttgctttgaatctggctcctcccccccccttttttttacgatttgtttatttttaatgtatatgagtacactatcactgtcttcagacacactacagatggttgtgagctaccatgtggctgctgggaattgaactcaggacctctggaagagcagtcagtgttcttaaccactgagccatctctccagctgccttgagttcgtttgttaagctttctttttctgtctgctttggtggtgtatgtctttcccctggtctagtggaggggttgagtatggtttttggatctttgctaagtccttttgcttggttctgacacttcacagtggccctccaggttgttcctcttcactgtttcctcgctcttgtcgtccttgccgtccttgcttgcctgtcctgattttctccacaactgcagcttatttgttcctcattcttgttgcctgtggatagtccatctttttgtcttatgtaaaagtaacttttattctcttgatgtcagagggttgcttcctctgtctgctaacctgggcttagtcctggaagcttgtggcttaggcctagattttttcagcctctgagacttgttgctcatcctttctagttgtttctgaacttgggctggctgattcatctcagctgttctggcccaacactggcctctctacgctgactgattgaaactggcttttctcagcttctgactgaattgctctgcttggcctcatattaactttggtaatatgttgtaatcttctggctccttctcagtctctggcttgttctgtcctcacctgtgtctggcttgttctctgcagcctgtctctgtacccagtaaaactatcttaagtctcctctcttccccctcgtctcatgagagttgggatagcctgttctgtcaaatcttattcgtccttttctgccgctcactgacatcattttcaaatatgggtgcttcttctaaaactaactttacctttattgtttgagattaaagatgtacgctaaggctgagccacactacaactagaaataggttttcccagtaaacaacacaatcatgggatttgcattgtgatcagatttcctgcaaaaatcttgttctgatttttgaaaattccctcctttattttttaaattctgttgttacttttatttctagtgtcttttaagtttttaagaattatacttttgttactttattaggagttctgcgttctctacattttttttttaattcttgtattctgtattttatactggggctcttaattataatggggtgttaatttagggctcttccttcatcatgaaaagtgatgaaaagtctgattagtagtcctaagcagtattctagtatacattattactactataacttctaaacatttagttctttgatgatttcatacatacatatagtacattacagttcccatatacctcatgatgagtgatctttagtcttctaggcttacagctggagctttttgtaagtcagttttctgtctctgttttatgcttctgatctttcctgtccactcagccaaggtcaccaagtgaactaaaatctcaaaagacttactggcttttaggcagtaggatgggtgttaagtatagttttcttaccttttttgggatttgaaataagtcttactgactttcaaattttcagttgaataatccgatgtttgtctgatgggtctacctgtttttctcttactactttcactgtgctctttgttctttatactgctgtgccagggaaatgttagtgatccccaaaaacacacagaggagccaattttttttttttaaatctatctatttatttatttatttatttatttatttattatatgtaagtacactgtagtgtgtcttcagacactccaaaagagagcatcagattttgttacggtggctgtgagccaccatgtggttgctgggatttgaactcaggacctttggaagagcagtcggcactcttaaccactgagccagccccaaaggagccagtttgatgcagctcacagcagggtctttattctatttgagctagcttggggctcccccgcaacccacctcaggacgggtttggtgatgggagagccctgaatgtctatcagggcaaggctttgtagtaaacagcaagcagggagcatgtgtgcaagcatctaattagaaagctcctgtggcctttaacatgattggctggtgctggaagtctatcatagacttaacttcggctcccctctgcattggtggtcattaccagggggtgggcttgtaacctggggtgcaggtttgttgggggaataacctggagacactggtctggttgagggtgtaacctggagatactggtcttgttgtgggtgtagcctggagactagaaacatcttcctgtccttggaaatatataattacataaaaagaggaaagatcaaggacaggaagatgtaggaattaaagggggagggtgtatgaggtgtggctaaagagtaaaaaattgcctttggggccagcctagtctacagaggaagtgtctgactgctaggactagacagagaaaccctgtcttcaaaaacccaaacaaacaaaaactcctaaattatatacaaacaaaagcaaaaccattatgaaacatatgcaagaaagaaaataataataagaaattaaataatagagaataagagataaagggaatatttgtaaaattaattgctggcacatctgtgctgacttgaaagtggggtgctcaaaacaccctggtgtgctggaagggagactgggacacattttccctgtagtctgtgttctcgggggttatctggggctgttgaagctagaggcctgcttctgtggtcatctctggtttcaccagggatcttgatccatagtttcttgtggtttgggtttgaggtttttttgtttgtttggttttttgtttgtttggtttttttttgtttttttttttttaaggtctcagtctatagcccaggtttgctattatcctcttattccagcttctcaactgacagtattacagacactccacagttggttttgttttgttttgttttttcttttttgtttttcgagacagggtttttctgtgtagtcctggcagtcctggaactcactctgtagaccaggctggcctcgaactcaaaaatctgcctgcctctgcctcccgagtgcttggattaaaggcgtgcgccaccactgcccagccttttcttttcttttcttttcttttcttttcttttcttttcttttcttttcttttcctttcctttcctttcctttcctttcctttcctttcttttcttttcttttcttttcttcttttttctttctttctttcttctttccttccttccttccttccttccttccttccttccttctttctttctttctccccccctctctctttttctttctttcttcttttttgttgttgttagcacagttgtttttaaaagacctcttctaggggccggagggatggcttagtacttgctactctttcagagactgcaggggttaagttcccaggacccatatggcttctcacaaaggtctgtaacttaagttccaagggaaccccgccctcctctggcctcactatgcacatcatatacctacaggcaggcaggcgggcaggcaaaacactcagacacagttgttaaagactgtctaaaattgtagtgatgtgttctttgataaaaattccaggtctatatacgcatatggtactgtcttagttagggttttactgctgtgaacagacaccatgaccaaggcaagtcttataaaaacattatttaattggggctggctcacaggttcagaggttcagtccatcatcatcaaggtgggagcatggcattatccaggcaggcatggtacaggcagagctgagatttctacatcttcatccaaaggctgctagtggaagactgacttccaggcaactagggtgaggatcttaagcccacacccacagtgacacaactactccaaccaggtcacatctattccaacaaggccacacctctaaatggtgccactccctggcccaagaatatacaaaccatcacttgtaccttccagtttttctcaatagtagaaattttaaaagttctgttttaaagtcagttccttggatggggtgtgtttgccctggtgcagatatgaaagtcagaggacaaccttccaaagctggttctggcctgtcacaaggtaggttctggggatcaagttcaagtcaacaggctttgcagcaagtgccattaccaagtgccctggcccagtctcatcagtgtgctaactcatgctgagcactctgaggctctgaggaggttaagtatattaacctcttcagtaactgtgaccaacaccctgaccacacaaggtgcagcagagtgcagcagctggctccaaggtttgcttgctttaccttttagacagtgatgtggttttatgaatgagtgccacctttctaataacttttaagatgccttttttttctattttgaatactgcagaaatatctacctatgttagaaacaaacaataatttcagtgtttcacaaagaattcacaaagtcaaagtatcaaaccaggctggcaacacaccagggttgttatcctgatttttttttcatccttggtgatagtacctcatcccattagtgaaaactccgggtcactaactggcacaattggctaatgggcatgaaaattcaagaaaagtgattccttaccaggctgctttgatttacatctttttcttataaatgtgtaataaatgtatatatttacaattatcttttaggataaatcctgccaaaaggcatagtttgatttcagtggagtctgtaaggactgctggttggtttgttgtattgagttatgtttctcttacaggaaaaaaaaattactcttggcctagagagatggtttagcatttagagtctttcatgccctcagaggacccgtttggattccagcacacacactgggcaacttacagttgcccgtgactcagtcccaggaaatctcttggccctcatggatacctatacatatgatgtagacattcacatagatatacacataaataaaagtaatctctattttttaagttattccttattccagtaattcaaggcaagctgtaacattttgggcaaaacaaagcgcttaatagtacgcatttgtgttttgctaaaactctttattaaatattaaataaaaaattaaatattgccattaattagaaattggtggtatttggcagggatggttctcgctctttacctgagtctaccaaggattcactatcctcctgccttagcctagaatatggtgtcttagttcgggtttctattgctgcaatgaaacaccatgaccaaaaagcaagttgggaagaaagtttatttggcttacattttcatactgttgttcatcattgaagaaagtcaagatgaaacagtaggaacctggaagccatggaggagcactgcttactggcttgctcctcataacttgatcagcctgctttctcatagaacccaggaccactggcccagagacggcatcacccacagtggctgggccctcctgcatcaatcactaagtaagaaagtgcactacaggtcaggcttcagcctagtgttatggaggcagtttttcagttgaagttgtctcctctctgatgactctagcttgtgtcaggtcaacataaaactagctgatgcaggtggttttttacagtatattgttaaaaggtatgttcatcgaatactaaaatgatagacaataagtctgtggttttattacttagatttagctctaagaagaatttaaactattgggtttatgctaaaactccacaagcttatttgttagggatagcatgaagcttttggttagaacttcaagtaaggcctgtgatcattacccaatgtgtctgaatggcctgcctgcccagggccatgggacagttgtcaatgacattagttttagacaagttgaccacagggttaggtcactaagatgtgaacctcttgtctctgacctcattccataaagaatagtctgctggggtccactgcaccacagtaactgggttctgacctttgtcagaagtttagctaagtggctagataacactctgcatcatgttttgacttccttttgacagtgttgttgtactctttcttctttaaggaaagggagctgtgtacagctttgacccagtgggctcttaccagagagactctttcaaggcgggaggctcagcaagtgccatgctgcagcctctgctcgacaaccaggtaatgtgcttgagcagagctctgcctgtggcagcgtgggcagctgtggtagcctccagtttctcattctgctgagatgctgctgaggtcttctgacgccgctcttttctctgctctgtcagtgcccttcagtcctcagctgcccatggctctataggctctgtctgcagccattggtcatgtctcgcttatcccatgccatcttaccttacatcacacaatgcctccttcattacccttactgtttctgggttatagtcgattccccaaacttttaatttgtctcccccccccctttttttaataccaccttgatccagacctgcgtttattgggttttctcagaggccttcagcctccaagctcagtaacccaatccgtgctgcctgtggttcctgtgccttgctttctgctgctgtgtgttcatctcacctgtgccacactctgccttctcctatctgatctcgcgctttagttagcaatgtttgatgctcttgtagttcagtgccttctcctagttttgatcctactgccattataagagtaccatgaccaaaagcaacttggggaagaaactcagttcatttcagtttaagagcttgtactctgtaatggagggaagttgaggcaggaactgaagcagagaccctgaaggaatgctgcttactagcttgtaataactggctcaaactgcttccttactcacctgcccacagtgggctggggcctcctacatcaagcattaatctggaaaacatcccacagacttgcctgcaggccagtcttgtggagacatgttctcagctcctagataaccctgcctaaatttttctgatggagctgcctaggccccttcttcctccttgttaaattttttacattatctgtatctgcctccatgtgtttgtgcttttgagaaattgggagcattgccccatttctgttgtatttaagctgggactagaatatccttaaactggaagacatcctgatgtgacttgatacatccaattcaaatcctgggacatggggatgttgtatgctgtgggaggttggggccttaggtcttggggacacgtgatgctccatgtgagtttctgtctctccaggttggcttcaaaaatatgcagaatgtagagcacgtccccctgacgctggacagagccatgaggctggtgaaagatgtcttcatttctgcagccgagagggatgtgtatactggagatgctctcaggatctgcatcgtgaccaaagagggcatcagggaggaaactgttcccctgcggaaagactgacatgcgggtcatatattggagctgtggcacaagtttgttttattaaaaagaatgtaaagtactcattttcttacactgtgtcttctctaagcatggcaaattgggaagaatttcttccttaggggtcggagagacaactctcagtttaaaaagtatggctcttgcagaggacctaagtttgattcctagcacccacctgtaactccagttccaggggctacagtgtcctcttctggcctcgacaggcacatgcaaatacccacatacaaatgtatgtaatgaaaaataaaaccactaatataatttctttttctttatctggatatatttatttattttgagatttacttttcatcatgtgtgtgtttccgtgagcatgtgccacgtgcatgcatatttatgtgaacagggtatgcaggtgcccagggaagccagaagcaggcgtcagttcccttagagctggagttacaggagctatgagctgtcaaatgggtcatctagaagagccacacacttaactattgagccatccctccagccctatatttttgtattttaagaataaggaaagtgggactaaggaggtggctcagtgggtgaaggtgtttgccaccaagcctgacagcttgagttctgacccttggatctctgtggttaatttgttttctggctaatacatacacatcttgttttttaagatttgtgtgtgtgtgtgtgtatgtgtgtaatcatgtgtccgtatgcacacagaagccagaggatggtgttgactcctggattggaatgagaaaccctatatggatgtcttcagcattaggattttacatacatttacatatcatttacatccacacttacatacactattttgaatacatgtggacatgcaagtatctctactgggatataagtttctttgggtatgtgtccaggaatggtatagctgggtcctataaaacctgtttttgcttttttttaataaacttctgttctgatttccatagtggctgcactagttgacacaccaacaatgtgtgactttacccaagtcagtgtcagtacttgtcatttgtattcttgatcattttgtttgtttgggttttttgagacagggttcctctttgtaacaacctctggcagtcctagaactcattcagtagaccaggttggcctcaaacccagatctgtttccctctgtctcccttcgagtgctgggattagagatgtgtgccgccactgtccttttatcttcttgatgatgttcattctgactggtgggagatggaatctcaaagtggttttaacctgtatttctctgaatgctaaggatgctaatttttaaagtgattactacctgtttatatttcttttgagaaactttgcttatttctgtcctggttagttttgttttgttttgtttgttttgttttgtcacattaacagcctggagtaacatgggaagaagaaaccattatgacagactttatgcaaccagattggtctgtggtcatatctgtaagaaatcatcttgattgatagaggaggccctagcccactgtggacagcactaacattagggaggtgaggcttggtctgtataagaaagctatctggggctggagaaatgtctgactgttaagagtctgtttctatacttgattttcagagcccgtattaggtggctcacaacagtcagttccagtggatgcaacacttttctggcttccgtgagaatctgcacacacatggcacacacagaggaacatgcatgcacacataagttaaaaaaatatttttgaaaagtgcttgcagcaaagaaagggaaagaaagctagctgagcttgagcctgtgagcaaggcagtaagtggaatttttccaggattcttgtcccaggctcttgccacctggtcttttctcagtgatgcgttgtaaccttggagtgtaagccaacgggttctttcctgtggtgctgcggtatcacagcactgtaatgaaagtagaacagaaactcgcaccaagagtagcgtcgttgtgatgaacctgtgttcatttggaggagtggggaaatgtttggaacttagagctggaaaagccattgagtcctaggaacttggtgagttgttcagtagtaacttggaagatagtgctatgaaaaacatggaggctatgaaggtggattgtgatgccttcgaaggaagaaagatgatcggggccatttggattaagaatctgtggttgctttttagttaggaatcatttgtgattaacaagataagcagcacccgttagatgaaagctttgagttttactaggacttggattctggtcatctggggctgaaaatcagctgtggttaataagaaatcgttatcattgaaataaaatctggaaagtatctattaaggataagcacacaaactgatctagtggggtcaagtctatctcaagctgttagctgaatttggcaaaatatctgtaagagtcacccacctgttactggttttaaaggcaggaaagctcttgattgaaggggtcataaagagaagctgaggactggcaccctgttgcagggttggggtacctgcagagaggcccaagaagctattggtgaaggcagaacatgagttgtagcagatattggagcagctcggacctgggatatctgctaagaacagtggtaagtgtgggatgaatctgacctgagcctgtactaccaccatgtgtgctggggacagcagagttggagagccctttagagcccagaagagtgtattgtaaaaggacaagtggacatgatagacattgatctatacagctagacttcggttttgcttaagtgtgttgtttatgtaatttatctttttccactgaagcccatatttaagggtctttgggtttatgaatgaatgaatgaattttgtgacaaggtctctctatgaagctttagttgacctggaattcactatgtagaccaggctgggctcaaactcacagagatccacctgcctctgcctcttgagtgttgagattaaaggcatgtgctgccattcccagcaagactagatttaaatttaaaagagaccttgtactttttaaagagttatttatttttaatgtatacgagtacactgtcactgactcaccagaagagggcatcagatcccattatggatagctgtgagccaccgtgtggttgctgggaattgaactcaggacctctggaagagcagtcagtgctctcaactactgagcgatctctcaagcctgagactttgtactgtttttgtttttgtttttgtttgtttgtttgtttttcgagacagggtttctctgtgtatccctggttgtcctggagctcactttgtagaccaggctggcctcgaactcagaaatccgcctgcctctgcctcccgagtgctgggattaaaggtgtgcgccaccacgtccagcctgagactttgtacttttaaagcattggaattttaaactttagttttacttgtaagagggaggcgggggaggtgtgtgcacatgagtccaggtgcccttggagaccggaagcatcagcttccctggatctggagttccatctgacatgggtgctaggaactgaactcagttcctctggaaatgctcttacctgctgaagcagctcagttaaaaactttagacaggtttttaaaattgcattttataaattgcattttactaacacgaggaaatggtgacaaacaagtagaaggttatggtttagcagtggttggtttgtgtgctaagttggcaaggagggaagcagcctgactcatctgggaagagggactcccagctgaagagttgcctggatcagactgggctgtggctatgtctgtaagagatccatatgtaagggctcagcccactgtgggcagcagcatccctaagtatgtaggcctgagctatataggaaacgtagctaactataaggcccagaacaagctttagaacaaaccagtaaggagtactcttccatgattcctaccttcaggtcttccttgagttcctgccctaacttcttccaagagactgaccgggaggtataagccagataagttctttcctccacaagcctttggtcgtgatgtttaggaaagcaacagaatgaaactaaaacacttccataaccaactttttaaaattaggatatggggctgaagaggtgttaagaacacttatcagcagttaacacctgcttttccagaagacccgagtttagttctcagcccctgcatggcaactcgagaccatctctaacttcagacccagcggatctatactaccttcttttgggatatgtgggcaacaggcatgtatgtggtatatggacacacatagaggcaaaacacctgtacacataagcaagaaaagtaaaaaaatgggttattttaaaatttaatgggtttgtgtacacacacacctgcgccatagtgcaaatgtagaggtcagaggacaatatatcagttctctctttctactagatggaccctggggatggaacatgggttgtgtggccatttccttattgatacattccaccctgcaagtaagtaagtactttaagacagaaggtaaacaaataacttaaaatccttgaagggagtccctggaactgaccagattcactaagatcccccctccatgattaaataatacagacggttgagagttactctcagacaaagcaagctacaaagaagactgtgagactagaccagtcacctgttgagctgcctgcaggctctacagtacagtatgatacaagtttccagcttctatgagctgtcatctgtgctggagtgggctttggttatgcagctgtctttgagtcatttctcctcctataagtaactctttacccatattctcgtaaatatcctcaataaaattcattggttcaccaagttggacttgtctactgagggcttcctttggatggtgaggagatggtaggttgcctgcttcccctgtgtttttgttgtcactgtgttctagttaatgaccctctgtcaactgtatagcagagagtttctaccgtgagctgctcttcacttggttgacttttctttgttgtacggaagccttttgttttctcaagctctcgtttgttaatatttagtcttatttcccgtacgactgctgtcctagtcataaagttctctatgcctatgtggtgacgtgtactctctttaaaattttttattttgtgtgtatgggtattttgtctgcatgtttgtccgtgtaccacggaagccagaaggcatcaggccctgtagaattttatatgcacagattgggagacactttctggatcctgggaatcgagcgcagagcctcggggagagcagtcagtgatcttaatcatctgaatcaactgaatcatctctgactccatgctgcctactttttgctctacatgcttcagagtctcaagattctatggtgaggtgttaattctatatacatttcccagcagtgcttgctaagagattgtcgtttctgcaatgtacatttttggcatccatcactgttgaaaccaggtggctgaagatgcatgttcttagatctgggctttctattctgtccatctagatgtctggttttgagccagtaccatgctgtttttattactgtggctctgtagcatagcttgaagtcaggtatggtgatgccatcaactgttctggttgtttggcaatcttctgtgcttccatattaattttaagattttttttgtcctctatatccctaaataatcgttctaggatttttactgaaattgtattgcatctgtgttttaggttgttagagtttctattactgtcatgaaacatcattaccaaaaagcaagttggggaggaaagagttaattcggtttgcactcctacagcactgttcattattgaaggaagtcaggaactctaaacaaggcaaggttctaaaggcgggaactgatgcagaagccacatggggagtgctgcttactgacttgttcctcaagacttgctcagcctgcttccttatacaacccaggaccaccgacccaagcatggaaccacccacaaggacttgggttttcctacatcaatcactaattaagaaaatgcctagggctagagagatggctcagtggttaaaagcactgactgttcttccagagatcctgagttcaagtcccagcaaccacatggtagctcacaaccatctgtaataggacctgaaggcctcttctgtctgaagacagttacagtgttccattcataaaatacatttttttaaaaaattcttttaaaaaaaaagaagaaggaaaaggaaaaggaaagaaaatggcttatatcggggtcttatggagatatttccttagctaaggttcccacttttcagaaatctagtttctgtgtcaagttgacatgagacaagccagcacacatctgtattttgctttttgtaagatggctatcttgacaattttaaattcttctaatccatatacatggacggtctttctatcttctcacttcccccttagttcctttcttcagtgtctttaaaggttttcttgtagaagttctgttgtttacttagttaagtttattccaaccaaaatagtgtgagtggagtggataatatctcttatattaaaactatttcatctacaaacaggaatatttttactttcctatttgtatctattttttcttactgctctgagactcaagcaccgtattgaacaggaatggagaaagttttatttttattttagtaaaaatgcttcaaatattttttacctttaccataatgttgttgtggcctcgttgtatattgactttattatgttttgaattatgtcccctatatccatagattctgtagcaaatatctcatgaagagatactggactaatcaaagacctttcctgaatttatttggtttctgtccttgagtctatttatatgacaagttacatttattgatttatacgttgaatcttctctttaatgaagtcaacttggtgctgaatgacgagatcttgaattagtttgctagtatcctactgagaacgtttgtatctgtattgatcagagagatcagtctataattttcttaatgttgtctctgcctggttttggtatcagtatgatattggcaaaagaaaaaaaaaagcaaaaccggtttggaagtttccttccttttctactttatagggtgatttgcaaaatactggtctccattcttgagtgaagggtagagatctatacagtgagtacatctgaacctgggtgttcttcagtcaggagatttttatgaccatgtcggtcttgctgctggatataggactatttaattttttttcattttgatttgattttggtaggtcatatacctatcaatttcatccatttctcttagattttaaaaatttagtggaatataggtttgtaaggtatgttttatgcttttcttactcttggtatctcttgtaataacttcttttttcatttctgatcttacaagtcttctctgtcttttagttaacttagctaagggtttgtctgtctttttaaaaggtttatttgcctttttaaagaaagaactctgcatctgattctttggtttgtcttgtactcactatttctatttcatgaatttctgcccttaagtatgtctccttatctactgatttggagtttgatttgttctgacttttctaaggcttcaaggtgcatcattaagttatttgagttttctctgtttttttatttttaaaattttgggcgcttagagatacgcactttcctattaggaccgctatttgttctcgggtggatctctagaacttgtgaatcatctttagaaaatttttcttccatgacaggcaagtatttagaacttcatttggagtgtgggctgatgactgtaaggcggattgttggtaaacaccactgttttgaactgggactccactgtcacctcaagcagacccctgacctgactcctgctttgagatgtgccacaaagatggctgaggcctgtcaaaggatggtggctattcctcattcatgaatgccaggttctgtgtcacgctcctggaggaggccaccaggtggcgctgtggatttacctctggtgcccccactttgtggcgagcatttcctaggatagagtttagtttgtggtaggcaggaaatagaacttgagtccggtagtaaatactgttcttccttaacttggcaaaaggacattttgtggtaacttgtaatctcagttcatgtacatattaaactgcagaggacagaagaagataaactggtcatcactgtactggatgcatgcgaggtgtgtgtttgatctggaggggagagaaaagaagacagaggaggaggagaaagggaactgactttgacacaaaaagacaaatatcagaacactggatttatttggagctatatacttgtaaaagatgggtctcactaggtatatagcccccgctgacctggaactttctatacgtaccaatttcaaactctgagatcttcctgcttctgcctccccaagttctgggattaaaggcatgtatcatcaggccctgtgattgttttttattttttattttaattatttctaaagcaatagacagatcctatttttcttctacattctcaactctcctattggtattgtacctgctttttagagtaggttgttgagaatcaactgtgacacctagaaggtaaggacatggctgggctgtggtagtcttaccaaattttcacgtcatttagaatattaggaacacacatctacagagcccaaacatgggctagctccaggtggcaactataccagcctgttcttctgcccttgggagtacagctttcatagtctggaattttctcccatcatggcaaagcctacacaggacttgctagcattttgcactccaggtggggctcaaatgttttagacttagcacaacatcccctggaaattgtactttctttgtaaagcttctcagtaagattgcttactgtttgcagagactctatgaaccactatgatccacaaggagagactaggaggaggttctaagcagcggttgtggaacgcatgtgaacagcaaagctgttgacacgatgtttctgttctattctgtaaagaatgtgttcgtgcatatagacataaagcagatgcttgggttttaaaaacgttcctctatttctttcttatttttaaaaaagattttatttatttatttattatatgtaagtacactgtagctgtcttcagatctcattacaggtggttgtgagccaccatgtggttgctgggaattgaactcaggacctctggaagagcagtcagtgctcttaaccgccaagccatctcaccagccctcgttcctctatttctttatcgtgtaatgaaacataaactgagatggcatcactggtcattatcatatgtaacctacagtcacaaagagaccaggtgttcctcaagggacagcgataccttttctaaaatacataatacattttcggttgtatttgagaaagttatatcatattaggtagaattatgacctgattatagctttcctttgggaattaagcataacagaaggatatgtaatttgtgtgtcaagttgacccagggtatacttgtgatagctaattttgggttgttaactgcatctagaatcaattaaaacccaagctcctgggcgcacctgtgagagactcttgattggatcatttgaggtggggagaccaatggtaaatccgtccgatactttctggtggcagtgcacataaaaggccgcaactttaacctttcccaggcttgcccccactctccctggcttgcccccactctccctggcttaccacctacttcttcctgattccaacactgactgaaaaccagcagctctccaggaatcctcagggactaggttaaaactaccagattaggactaccaagatatgtagaacaacaactggtgtacatacacacacacacaca

SEQ ID NO: 147 - DNA, 800 bp, Mus musculus
cagcaggagttaggcgcgatgctttccactgctgcttaccgagacgtggaacgagagctgggaatggggcctcacggctccgccggccctgtgcagctgcggttttcgccttatgccttcaacggaggtactgtattggcaattgctggagaagatttttccatcgtcgcttcagacactcgattgagtgaaggattttcaattcatacccgagatagccccaaatgctacaaactgacagacaagacagtaattggctgcagtggtttccatggagattgtctcactttgacaaagattattgaagcaagattaaagatgtacaagcattccaataacaaggccatgacaacgggggcgattgctgcaatgctgtctaccatcctgtactcacggcgcttcttcccttactatgtttacaacatcattggaggacttgatgaagaaggaaagggagctgtgtacagctttgacccagtgggctcttaccagagagactctttcaaggcgggaggctcagcaagtgccatgctgcagcctctgctcgacaaccaggttggcttcaaaaatatgcagaatgtagagcacgtccccctgacgctggacagagccatgaggctggtgaaagatgtcttcatttctgcagccgagagggatgtgtatactggagatgctctcaggatctgcatcgtgaccaaagagggcatcagggaggaaactgttcccctgcggaaagactgacatgcgggtcatatattggagctgtggcacaagtttgttttattaaaaagaatgtaaag

SEQ ID NO: 148 - protein, 244 aa, Mus musculus
QQELGAMLSTAAYRDVERELGMGPHGSAGPVQLRFSPYAFNGGTVLAIAGEDFSIVASDTRLSEGFSIHTRDSPKCYKLTDKTVIGCSGFHGDCLTLTKIIEARLKMYKHSNNKAMTTGAIAAMLSTIKRRFFPYYVYNIIGGLDEEGKGAVYSFDPVGSYQRDSFKAGGSASAMLQPLLDNQVGFKNMQNVEHVPLTLDRAMRLVKDVFISAAERDVYTGDALRICIVTKEGIREETVPLRKD

SEQ ID NO: 149 - DNA, 40783 bp, Homo sapiens
ctactatagctggctaacatcatccctatacatatacaaaattcttcacatgatcccaatacaatacatatataacttagcttattttatagactgctgtactcccagggattcttatatcacagacactcaataaaagatacaaaacaatgcacattttactttagatcttcattttattggtgtcaaggaataagcataacacaaactctttgatatacagattttttttttgaggcggagtctcgctctgttgccaggctggaatgcaatggcgcaatctccgctcactgcaacctctgcctcccaggatcaagtgattctcctgcctcagcctcccaggcgcatgccaccactcccggcaaatttttgtatttttagtagagacggggtttcactatgttggccaggatggtcttgaactcctgacctcagatgatccgcccacctcggcctcccaaagtgctgggattacacgtgtgagccaccaagcccggccaattttttttttttttttaagagacagggtcttgccatgttgcctgggctggtggtgaactcctaggttcaagaaattctccttcctcagcctcccaaagtgctgggattacaggcattagccactgtgcctggcctgatctacagacatttgttttatagcgtgaaatacattaaaatatagagacacggcagaggagacaaaaaagaaaaaaaaaagaaatacattaaaatagatctaaccttgggattatattcggcgtttcgggcacgaagtgcaatggtctttaggtcaagtttacaaccaagattcactgtggatacaatatttctgtaagagatttaaaaagaaaacacgactatttaaattacttaagtttcattggatgaggcgttagaaattatgcagacatctgattatttcaaccaggctttacttttttttaattgctcacatttattgtttaacaagtatcatgcacatgttgagcattttatatagattattccatttaatacatataacgcactgaggtagaagttaccagtattcccacatttggataaataagctgaggcttaaaggtagagtgcaacttgctcaggacgcaatggctcccaagtggaggagccaggatttgagtctgtctgtctccagagcctgcccttagccttctcacagacaaactcaattctcatctgtgagctctgaaaagctaccaccaccaccctattcctaagtaactatttataatgaaaacaagcaggcatgaactgcccagttctctcaaagtaagtatcttttgaaaaacaagagctaagtgtctttagcaaaaaaaaaaggcaaaaccctgctttctcttctaattaactctcagtaaataaggataaatggagccatctgggtccactgacccttttcatttctcagtgttcttaaatcacttaacgaataacttatacaaggataaagatatactaaaaagcaactctattagaaattttaataaaaatttaaacaacaaacccacattttcattatacatttttctgcttatgaaagtatatatagttgaaatgggcaatgccctttgaatgcaattaactgctcaacaactgtctcgcatggacctggaaatcaccatcccaagaatatcgagtccagatttcaaatacataggttcaaatacaataggtttcagctcattgttgcttctggttctttttcttgtacagtctatgatacacaactgtaaagccaattaggttgatccacacaatgaatgttttcatttccatatcatctatttccttccaatcacccttgtatacacacctgcctttagcatttgtccacttatgaactataccaagtagattttagtatatctatcacaactttagtcacataattgttaaatgtattcttatatattttcattaattaaatatttaccttaatccctcttaagcctacaagatggagagggcactgaactaccacccgggagggttcttagtagatagtggaaattcaggaatgtggatgactggatgctctggggagtatcagaacagcaaaggcactcgcaagaaacaaacacctgactgtactgtttataatttattatttaaatcagaaatgcaaacttaaatattcctgggagtcagacaagcatgctggacacatgggagtggtatagacaagggtgagctaaaaagggctctctctaaaatcactaaaattactttgtttttaaaattgtgtgtggggtcaaacaaaattgtggaggcaagatttaggtctttgggtgaaagtcagcatccacgattacacaccacttagttccaaaaatgatgagagatagcttataaacaacaaccatatatgtaacaaggtgaataaatgcaaataggaaatactagatctaaagggagtatgaaggaggaaggtatctgtacaagaaaactgaggagatgcagagactgcaagtaaccttttaatttggtcataagctttctaaaatgaaaagctatacacttcttattgactggaattatttggaaatatttgctggtttttcaggaagatgaaattatttcctacccctactacactgttacatatagaacccacttcatttaggtagaaaaatccatttatgacaaaaacagtcgtcttcattttgtgggaaggacacagaccttcaaagatttatatgcagcacccatagtaaaaacaaaaaacaagaactaccagaaattatactgatattgtgactaaagacctaaaatagcataagggaaagagactacctaacattgtgatttagcgatatcagatacagggaaatgtctataatataataacaacgacagtgaaagtcagattaaattttattggctcaggtatgtaaacacaaatgaccacatttctaaacctgttaagagccttttactgaggacactgactaagatagctttgcttccctttcccaaatgtgagataaagcaaattttgatacacaattaccgttagtgccactccctcccttaataaaaggatccatctgaaaacagagcaggaacataactcaaagggactcctaagtgggaggaaacataaaacacgaagtactcactgcagctgcggtacaatcccagaactctccgaagctggcgtggcaggagtgatgggggtcatgggagtcatgggggagggatacagtggagtggtgcccggcaagggtgcagttgtgagagtctgtgagtggaagagctgtggtgcctggcctgaggttccctgtgttgcctgctgggacgttgactgctgaacggctgcagctgccactgcctgttgctgctgctgctgctgctgctgctgctgctgctgctgctgctgctgctgttgctgttgctgctgctgctgctgctgctgctgctgttgttgttgctgctgctgcctttgttgctcttccaaaatagacagactattggtgttctgaataggctgtggggtcagtccagtgccataaggcatcattggactaaagatagggattccgggagtcatggcaccctgtggaaagcaaggagaaaaacaggttaggctggctgctgctaagtgtttgtggaactttcttggtggaacagcaggtcaggtgtgcaaagacagatgccttcggagaataatggggttattaaacattaattacggaagaaccagctattcttatacacattgctttcttctttaataccacacagtggataaacatgaagaaaaatggataaactgaacttcggaaaaattaaaaacttctgttctttgaaagacaccattgagaaaattaaaaggcaggccagactgggaaaaaaatacctataatacatacatctgagaaaggactggtaaacagaataataaagagctctgacaactccataaaagaagatcaacaaataaaataataaaaaagggcaaaagatgtgaaggacatattacaaatgaagatacaggcatacctcggagatactacaggttaggttccagaccatctcaataaagcaagcggcatgaattttttggtttcccagtgcctacaaaagttatgttagcactaaagtctattaagtgtgcaatagcattatgtctaataatatgtatataacttaatttaaaaatgctttattgctaaaaatgctaacaatcatgtgagcctgcagcaaatcataatctttttgctgacagaggatcttgcctcgatgttgatggctgctgactgatcagggtggtagctgtggcaatttcttaaaataagactgacgaagtttgccacactgactgactcttcctttcactgaagatgtctctgtagcatatgatactatttgacagcattttacccacactagaacttatttcaaaattggagtcaatcctctcaaaccctgctgctgctttatcaactaagtttatgtaatattctaaagtcatcagttcttcaccaggagtcaattctatctcaagaaaccactttctttgcttactcacaagaagcaactcctcatctgttcaggttttatcaaaaaattgcagcaattcagtcacatcttcaggttcacttctaattctagttcacttgctatttccactacacctgcagtaacttccagcactgaagtctagaacctctcaaagtcatccacgagggttggaatcaacctcttccaaactcttattcatgttgatatttcaccctcctcccatgaatcatgaacattcttaatggcatctagaatggtgaatctttttcagaaggttttcaattcactttgcccagattcatcagaggaatcactatctatggcagctacagcatatgtccctccctgcttcctttctttgagacagggtctccattgtagcctttaacttctggactcaagtgaccctcccgcctcagcctcccaagtagctgggactacaggcacatgccaccatgaccagctaattaaaaaaaattttttttttgtagcaacagggacttgttttgttacccaggttggtcttgagctcctagctttgagtgatccttccaccttggcctcccaaagtactgagattacaagcatgagccaccatgccctgctgtatttcttaaatagtaagaattgaaagttgaaattactccttgatccatgggctgaagaatggatatattatttaagcaggcatgaaaacaatattaatctccttgttcttctccatcagagcttgtggacaactagttacactgtcagtgagtaatattttgaaattaaactttttttctgagcagatctcaaagagcttaaaatatccagtaaatcatgctgtaaacagacgtgctctcatcaggttttgttgttctgtttactgaggacaggcagagtagatttagcgtaattcttaaggctctatggttttagagcagaacatgagcattggcttcaatttaaactcaccagctctattagcccctaactagtcagccagtcctctgaagctttgaggctaggcactgatttctcctctctagctataaaagtcctagatagcatcttcttccagtagaaggctgtttcatctacattaaaaatctattatttagtatagtcaccttcatcaattatctcagctagatcttccagataacttgctgcttcatgttgcatttttatgttgtggagaaggcctctctccttaaagctctgaataaacctctgctagtttcaaaactttcttctacagcttcctctccgctctcagcctttacagaattgaagagagttaaggccttgctctgtattacactttggcttaaggggatgtgtgggtggtatgatcttctatccagaccattcaaactttctccatataagcaataaggctgttttgctttcttatcacttgtgggtttactggagtagcacttctaatttcctttaagaacttttcccttgcattcacaacttggctaactatttggtgcaagaggcctagcttttagcctgtctcagctttcaacatgccttcttcactaagtataatcatttatagcttttggtttcaaatgagagatgtgcagctcttcccttcatctgaacacttaattaaaagtcactgtaaggttattaattagcctaatttccatattgttgtgtctcaaggaatagggaagaccaagcagagggagagagatgggggaatggttggtcacgctgcagacatttatcaattaagttcctgtattatacaggtgcagtttatggcattcaataataattacaatagtaacatcaaagatcactgatcacaataacagataataatgaaaaggtttgactaggcacagtggctcatgcctgtaatcccaacactttgggaggccaaggcggatggatcacttgcagccagtagtttgacaccagcatggtgaaactccgtctccactaaaaatacaaaatttagctgggtgtggtggcgcatgcctgtaatcccagctacttgggaggctgaggcaggagaatcgcttgaacacgggagatggaggttgcagtgagccaagactgcaccactgcactccagcctgggcaacagagtgactgaaaaaaaaaattaaaaaaaaaatacaaaaaaaaagaaaaaaaaaagtttgataacaataacggataataatgaaaaagtttgaaatcctgcaaaaattaccaaaatctaaccccaagacatgaagtgagtacacacttttggaaaaataatgccaacagacttgctgggtacaggtttaccacaaccttcaatttgtcaaacatgcagtaaagtgaagtgcagtaaagtgaagtgggcctgtgtatgagtggctgacaagcacttgccaaggtgctcagaaacattagtaatcaggcaaataaaaatcaaaaccacaataagatactactaagcaatcactagagtgaaagtaaaaagactgacagcagaaagtgttggtgaggatgtggagcaacttaaatctcttatgctgcaaaacaatacagccacttcaaaaaacagtttggcagtttcttataaagttatacatataccaatataggacctagcaatcctactcctaagtatttacccatgagaagtaaaaacagtgcattcaaagtctacacatatgtttacagtgcttttattcgcaatagctccaaactggaaagaccccaaatgtgagcaactggagaatggatgaactgtggaacatccaaacaatggagtgatacttagctatacaatggattaactactgatatacaaacagtatactgggctaagaagtcagacatacacaaaaaagcatacactctgattccatctatatgaaattctagaatagacaaaactaatcttcagcattgaaaagcagatgcagtagttacctggggccagcagagtgactataaaggggaagaagggactttttaaggtaactgaaatgttctgtaatttatacattatatataattatcaaaacagacacttaaaatgagtttttttgtatgtatatttcaacaaaagttattgatttttttttttttttttttttttttttgagacagagtctcgctctgtctcccaggctggagtgcagtggcacgacctctgctcactgcaacctccacctcccgggttcaagcaattctccttgcctcagcctcccgagtagctgggattacaggcacccgccacaacacctggctaatttttgtatattttgtagagatgaggtttcaccacgttggccaggctggtctcgaactcctgacctcaggtgatccgcccaccttggcctcccaaagtgctgggattacaggcgtgagccactgcacccaggctgaaaaatttttaaagtagatgggtggttgagagcttgaaatgtaaaaggggaaaaataaaactagaaaataatttggtgagggtgattttcaaaatcaaagaccctatatagtcatttggaacattctcataagtgtttatcaaaagattaggtgtttcataaatatataacttagcttccagacttcccaaataaacaccattgtgcctattcaaagcctaatagaacttctcaacaaaataaggcttaaaaaacatattaaaccattttcaaaaacagatcattaaatgcccttccttgccttttgataccatctcttgcagttcagatttccgccctccctattctctccctcctgctatattacctgaggggaggccaagccctgagcgtaaggtggcaggctgttgttctgatccatgatgttcactttcttcttggcaaaccagaaacccttgcgctggaactcgtctcactattcaattttttcctagagcatctccagcacactcttctcagcaacttcctcaattccttgggttatcttcacacgccaagaaacagtgatgctgctttggaaaaaagtctaaagtttaatttaaggatccaggtaacctgtacagtcctataagccagttctatggctatacaaaacacaaacatgaaaaccaatgaagctattttggaatacatttgtttttaccttataatcctaaagttttattccttccatgtttccggcgattgcatgtaaaatcgccaacaaaacaaaaatcattttgttacatgtttaaataatcggaaaatgctcaaaatcgagctgtcataaccagcattaaaaacttttgaggaaaaacacctagagaaaaataattcctaagcaaaatgtaatatcagagcagaatattcactaagcactgtatacacagcactgttaggcaaagtttagatctttaaatattccaattttacatcctctacaatgtcttgggcaaaaaattaagtaaatatcaaattcaatccaatatacttcagagtgatcatttatcaagctcctactgtaatgaaactgtaaaaaaaaaaagccgcacaaagataaagccctgaatttttataaatgtaataaccttacctctttagaacacattaatgcaaactgtgcctgttatctgacttttcttaaatcatcatcgctttactcactacacatctgaaatgagtttataacaacatattctcacatagaacttagaggtctcaaagttacaaattatatgtccaaagatccttcaggcatatgcacttcaagcatgtgctggtacagaacagacactcagatatttgctgaatgtatgaaagactctgacgatcactttgaaagggcaaatgcccccaaagactatctatcctacatactcatcactgaaaaacagaccaaaaaagaaagcaagctctgcttctggaaataaatatatcagagatattttttaaaatatactttttttttgacagttatcctataataacaataacagaagtcctgcagatgaggatataaagataggaggatatagtccttggcatcaaagtgttcaatatgaagggtatgcaaataactactgtaaaacatagtattataacagcaggtatggtctaagctaagttccttgaatgcagaaaccagcctacatgtctttgtgatctctgcatctagcactatgcctggaatacagtatgtgatcatgaatgagcccatatacacccctggaagagaagacaatatagactaacagccaatcactgtgaagagagcgcagtgttttcacaaagcagggaccatctaacttgggtctcacaaggtgagtaggaatttacacatcagggcttcagacaaaagagaaatcaagcagaaagagacagattgaaaaagcatgcagtatgcaggcgacaagcttagtatgactgtatagaaggtcactgcagcagatgagacagcacatattggtgggctcatactatcaggagttttcaatgttattgcataggcaataataacagttatggaattttggaagtgcagtatgaacagatctaatttggcaagactagatgaatttgagaggagtaaaactggaggacggaagtttcgtttcaggaatctaaggttgaggcaagagataatgacggcaggatttaaagccattataagtatgattagagatttatccaggaccttcggtggcttcaggccactttttgcaagtaagtctacagaagaaaccgcacagtgattactgcactaatttatcctcagaaaagagttgtttgctgggtatcttcatctcctggaaattgaaacatcaaatccgatattttttggaggcaatcaaattaattctgcatagccttctagtgtctgtataactaaatgaagcacagtcttttcacagaaaagtctacctagagatttggaaaaccatgatggcctgaaccgagagacgggagaccctgcaaataaagtggtgtgtattatatcttaagcgctaccgtgcccgctgtctcaggcttctgacaaaatatttaagtctcaatgttggcagcaaaacaggcgggcacagatctgggtgaatctgcttctaacatggagaagaagcggatggcaggacagggcagggtaaacttagggtcttcgatgcaagggactgtcctgtcccgcctgccgccgcccagccagccagtagtaccctgagccccacaatcgtacgatgggaagctgcctgcgaaacacagcagagtagggcaccaggcgggagtggcggccgagtggccgttacaggccggaacggcggcagcacgaaagggaggaacgtcccccgaggggcctgcacgcgcgccaattcctagtctcttccccaccattgcccccaggcctcagtgcagtggtggccttcgcccgaaccgtcagaaaagagtacaatctgttacctgggtcactgcaaagatcactatgggccagcggaagcgaagttaaacagccggcggcccaggcgcccgccacagcgaacctgcccgacctcactgaacccctggcgcgcgttgataatgtcacttccgccagttctgccctcggcttcagcgagttgctcccactagggccgaggccatgagaagtgtgagcataggtcacttcctgtgtttccataggtaaggaggggcgaagctcttgaggagttccggggcggggccgccgtgccacagccatctctaattggcccttgctggacgtaggaaagatcgatttttaaatggcgtgtgtgtgtatatgtgtgagtgtgttttgttgttgttgttgttgttgtttaaagcaactagcggcgttaccttcgacaagttacctgacctctcccccgcattttttttctgtaaaattgaataatgataacagtgcttacccttgggctgtcgggagattgacagagattgacagaatcagtgcctgagcagtgcttggcactcagtaagcgcgtcctccttacctgtcagcaagaacgctagctgatcttcaagcgtgtagaatgacaaggaacactaagcaaaacaaacagcttgtgtttacacatgcatttatattcagttctgccactcccagttcatgcactgttgtcacatggctctttccgcagttgtttcttagtgggacttcagcacgccttgattttcccttctgtagttcattgtggcgtaatcatatgttatactgcttgttttctttgtactttttattatcagtgaggttgtgagctctttaaggataggaaatgttatatacattttttattagccaggacaattaacgttcccaccgttattcgagttgccgttgcgccatagttctgacaatttttttgtatggtcagacttaaatttttgtccattggggtgaattccaatgttttcttcgagggggaaaaaaacaaaaaacaaacaaaaaaaaccctttacatccctgtcagcgctttttggaatgggcgggattcaactaccaaagggacaagccgccgtgcagccctccaggagcaacgactagcgtgagatagagaggccgggagcgaacttcaggagaagccggaagtggcgtaacgtccggtcaaggcagccatctcgccgtgagacagcaagtgtcggatccgcaggcgcagccgtgcgatgttgtcctctacagccatgtattcggctgctggcagagacttggggatggaaccgcacagagccgcgggccctttgcagctgcgattttcgccctacgttttcaacggagggtaaaaaccccagagagctgcggctttcactttcgcccttcccccatctgctgaagcctatttaggagtcaccgccgtgatggcgctgccccgggctcctgcaggcctcagaaccctgagctgagggggtccgcacaaggccggtctccctgccgtcctctcatgcgctgtgtttccctcttcaggctcgctttgctcaagtttacttggtgattgcgatacagccttggtttttagggtttcccattacagtcatgtcatttgagtttttatgtggaccgccactccgtgctccttgctgctgtaagacagtaaagtagaaattgaaacatagcctctgctctgtggaagaccattaaaactggacctcatgtacacgtttcttatgccagccggcgagggtagagggttagcgtctgaaacttaaaagttagggttgtttggtctgtgttgttagatgcatagctgggttggtagccgagatgtctaattgtagccgcctgatttctgttatttctaattgtagcagtttaatcattttgttttatttcaaatagaaggtgggattggctgagcaaacttagtttcatagataagtgcttttttttttaacgtttagcttaagttcaggaaaacaaaatactcagaagatggaccttttagtatgtgtgttcttgtatgttatgttcaagttttggtttttattttaattaccagctttatcttgagtagtataattttccgtggtggcacgccagagatttagggttatagaaagatgctctgtttaagactcttgacagggaagagctgtaaattgaaacagtggttatagttaccaatcaagccttgtacattaaaatatacacacgcaatttgaacgaaccgatggttcttaaaacagaaaatattggctgggcagtgtggctcgcacctgtaatcccaggactttgggaagccaaggcaggaggatcatcgcttgaggccaggagttgaagaccagcctgcgcagcatagcaagaccccatctctacaaaaataaattttaaaaacaaagcaaaaatgttaattggttcctcataaatttgaaatataaatgcacattttgggagtgtgttagaaagataacgaaagtctgattttagccttggttctgccactaaaggacactttgggtacttctgaacttcttgaacctaaatttccttatcttccttagtagcttcatagtttttggtgagaatcaagagagatgcattttgtaaattgcaagctgtcatcttatttaatcctcatgaaaagtgaatgttagatgatattagcatcctagggttatattagacgttaaactgtcagggtcagagagctggtgtgaagttgagccaggacttaattcatagctatttcaccactgagtttatggatgcttttccattatacaccttaacacttcctgtgatgactaattaagttgtatattgtagggagggttattggacccgtttcgtaaggctattctctataaataagaattttcagtgttcagtatgccctactcgttactcactttttaatcccttgtaatccagtttaagccattactgccctaaaaattacttagatctttctgattactttttctcagtcattgttctttttctttagtgattactgcagctggctctcaggcagccttcgcttccgcaaaatgaggcctcattctcttttcctactctgtctttaaatgtagttaagtcattagccgccttgtttatcgctcagcactctttcatgtctcattgctgggaggattactcccaaatctggttttccagttctgcctctcatgagtccctcgattcggcttcttcagtaaaacatttttaactggtttttctgctctcagggcaactcaagacagctagcaaaacaaaaagcaagctaattattccccttcatctcctcttctcctttcttcttattttttgagacagagtctcactctgtcacccaggccggagtgcagcggtgcgatctcagctcactgcaacctccaactcctgggttcacgcatttctgcctcagcctcccgagtagctgggattacaggtgcctgccaccacgcctggctaatttttgtatttttagtagagatgggtttcaccatgttggccaggctggtctcgaactcctgatctcaggcaattgaccccccccccccctcagcctcccaaagtgttgggattacaggtgtgagccaccgtgcccggcctcctctcctttaaaatacttataattatgccatcattctgctcatctaagttctaaatcttggatgtcataattggttttcccagttcctaaaacatttgcgtagatataaaaatttgtctattttgtgtgtttgtgatgattttggatttactgttcaccctgctaccttactattgcattagtagtattagaacagtgtttctgtcccatttcacatactatgttgttgtcagagcagtcttcctaaaaccccactttgtaaatggaacttttctctctcttgcattccttttttaaagaccaggtctcactctaatgcccaggcacgatcatagctcactgcagccttgaacacctgggctcaagcagtcctcccacctcagcctcttgagtagttacaactacagatcattcttgctcagaataccttcatgatttcttgctaaaattccaaaatctttagcttggcatttgggattttctacagtaggaaccctgtccatcacataaaccttaacgtcactacatgtgcttatgcaaaaagggctgcctgaatgagttgcttgaatgtatgtactatttgaataattacctgtttgccattgcttgctgtttatattacctggaatgccatccttttcttcttgagagctttagcacaaatccctcctcagtaaaaatagtggcttaagtttcctgagtgcttacgtctgtgaggcaccatgcctttaatttccactattgcattgaagcagtggttatagttatcagtcaagccttgtacattaaaatatacacacccaaatatatatacacaccttgtgacacaggtactgttatcatcaacttgcatttggaggatttgtccaagatcacatacctagtaagtagcaagagtgggtctctgtctcatgtaattccagagcccaggtgcttagtcatactccagtgccatagcacttatagctaacacttactagaggaccagttacatgtcagggactgctataagggcttacatatttgatcctttgaacaccctaatgaggtagcaactgcagtgatctctgttgtatatatgatgaaattgacgctttgagaagtaacttacccacagtctcatatctgcgaaacgggaaagccagaattagaacccaggcggtctgcttttggaattctactgtaagtctctttgataagctgtcaaattgtacagccacagagggaaaaatttactgtttgtccatctatttgtcattatataagggattgggtataaagaaataagcattatataggcgttatataaggacttggatataaagaaatgaagcaagaaaaaaaaatctcatcttctctaaactcatagagcttgcgttgtagtaccactgtctatacctgatcctcaagggcacagatggggtatttagttgttctgtattagtagtaccttgcgcgagtaagtatttaatgtgttggtgatgataattcattggcttttctgttaactcctgccaaggagactttgccctgatttaggcttattaataatttttttttcccagacaactcgtagccaggcgttcattctcttcccgctcatctttcctcttcccatttgaatcatgtttttgttgacatctagagtattttatcccattatgtactatggagcattcttctatttgtagggataggattaccaccctggagaattaatttttttcttttttcctcagtactatactggcaattgctggagaagattttgcaattgttgcttctgatactcgattgagtgaagggttttcaattcatacgcgggatagccccaaatgttacaaattgtaagtaaatatttctaaagacatttcacaatgcctttgtaatgatttaatgttgtgagagtttctacttctaaatgatttgtttcatgagtttttaagttgctgttgggagcatttttattagaaaaccattttctaagttaatgtttcctaataatttaatgtgcagtcttaataatatttgctgtattcagggtaccaaaagtgctttcggtaacctaaatgtgttcaccccagcattttaccatgaaaaatttcctgctgtgtcttaacatggtggaaggccagagaaagaaagaagagcaagcgaacccactgctgtgataatgtccattcatgaaagctgagccctaggacctaaacacctggtcccaactcccagtaccatcacaatggcaattaaatttcaacatgagttttgaagggaatattcaaaccacagcaccattaatccattaaatgatattttttttaaatctgcctccccacactttttttttttacctgaaacattcgttttagaaatatcctaagcaattatgtccacagctcagttttaataggctagctatgtttttcctaaaacatgaaaataaagccaaaacttaaaaaaacaaaaagcctgcataaatactgaatacatactgcagattggcagtggtctgtatttaccagttttggaaatgcttataaatggtcatgaattcctgggttaattaaacttgaattgtaataggaatgggacttacgaggtttaggtcctttggatggaccctccttgtattgtaggaagtaggtacagaagaaaagatacgttgtctttcctgctcctagggatggcccacatcttaaaaagcaatgaagtttgttttcgtcttcccagttctgtttctctccacttgcatcttttgataccccctttctgctttctgtttatggtgctcttgtgttacctttttttctcctcaaggacgacacttgtacaacttgaaagtagtaaatattagaaataagattttaaaacaactttatggataccatccttgtactagcttttactcatcttttaaatattgctttagttacgtttgctggtgaagtgagcactttttttttttttttttttttgtgaaacacgtcagatatagagatagagaataagaacaatgcagcattaacgaatgcctgtatatatccctcatcccacgtcctgtggggctgacctagaactaagcttgcctcttccaaacctgtttcagactgtattctttgcatgaaaactcccattcctttgatgcacctggatatttgggaaaagcatcttgaagttctaagatttctgtctttccctgttggtattgtcaaccaatcttgtcagtaaaggcagtaaagccttataggggattggacgtcttcaccttagtgcagtgaggttgatggtaggcatagatcaggtgatgttagtgatgaccctagaggtgtcagctgctctcctagtaggacaggtatggtttgtgcgagtcattcgtaagtttccaagaggaattgtgtggcctctgcaaaatattgtttaggtttctttatagattcatatcaagatctaggaattaatttttgaaatacacggttgaatttgtatgtctataccaaattttaatcctctccatacagatggacatttaggttttgttttgttttggggtgctatttaaatgagtactcactggtgagtctagagcatccctttgcatacttggataagtatattaacaagatggatttctagcaatagaattggtgagagtggtgtgtatttaaatttttaataaataccaccaaattgcccatctaacaggttaatcagtttatactgtttccacaacctcaccagcatttagttagttaggcatttttagccagtataattggttgaaatagtctctttttgagatttggatttctgagtaacatagaggctcttatgtttatggtgacttaatgtctcttttttctgtgacttgtctgttcatagaagttacccatctttcctttatgttattgctttccttatttgtaagaatttttatagaattaaaattagactttggggttagatgctactaatatattttcttagggttttaaaaagctattcttaaatttccctgtagaattttatgtagtcaaatttatgaaatttttctgtgtggcccttggattgtgttgtttaaatctaccttcacgaggctgggtgcagtggttcacacctgtaatcccagcactttggaggccaaggcaggtggattacctgaggtcaggagtttgagaccagcctggccaacatggtgaaaccccatctctactaaaaatacaaaaatcagctgggtgtggtggcgggtgcctgtaatcccagatacttgggaggctgaggcaggggaattgcttgaacccaggaggcggaagttgcagtgagccaagattgcgccactgcattccagcctgggtgacaagagcgaaactccgtctcaaaaatcagtcaattaacctacctacgtatcttcctcagcccaagatagtaaaaaaaattcacccatgatttatttagtccattcatagtcgcatttttaaagtctttgatccacctgtaattcatctggaataaggggtaagatggaatacagacccctcctccccagaagggtgactgtttgtcccattaccatttagggaatagtgggaatcagaattttaaatttaaaattgccgaagatatgttttgctctactatctaaccagctcagttttctgaaatgtgctttttacagaacagacaaaacagtcattggatgcagcggttttcatggagactgtcttacgctgacaaagattattgaagcaagactaaaggtagatgcttttgtacatttctacactattttaaattaatagtaattcattaaattcttttaagcctacagcatgactgttggtcagatagctagagagtcactaggttagtagatgaattacaaatgtatgctagaaatgaaatgatatcattaatgcagggtcattaaagtagcataatgtgaaacagcagcacattccatttgttaaagtcttgtatcatatgaagggttctctacccttttagaaggagcctgggaggagttcttcttctgaagatactcttccctcaaaaacaaagcaaatcaatttctgtggcaggagagagcccaggaaagatttgacacaggagcttggtttgcatcaccatcagttgacaagcttttcctctttacagtgctgtgctcttagttggcaggatgcatgagtagaaatatgaaagaatgaataagctgggagcttggatgggaggcacaacatgcaccattaacgtctgtcacctgaccagcttcagttgatagccagctgccagaagtcaggggtgatcacattctgttttgcctattcatgaataacacttgagattatttacacttatgagtggttactggagtatatagtatatttatttaactgacacatgctttttgaatgtgtagaaaggatttcactcagtatttatcaattgttaatgcttttttagaaacttacattgaaagccatagtgacttacatttattggcatatttatatgataattcctaatgcttattttataaatgggagttagaagacaaaagtaaacatgatattgttaataaaacaaggaatggtgaattctacataatacacaccccttcctgaagtttttctctcatactttattaggtggtgaagtaaataaatgttggtgcttggtttcgaaatgaaatggaatgaaatttttttttttttttttgagacagagtttcactcttgttgcccagggtggagtgcaatggcatgatcttggctcactgcaacctctgcctcctgggttcaagtgattatcctgccacagcctcccgagtagctgagattacaggcacctgtcaccacccctgtctaatttttgtattttagtagagacggggtttcaccatgttggccaggctggtctcgaacccctgacttcaggtgatccacccatctcggcctcccaaagtgctgggattacaggccagcagtgagccactgtgcccggcctatgaataattttttatagtttttatcttggaaaggcattcctctataaaaaacttacctgttacttgtagttcatttctaatcatttttcagtgttttgactgtcattatttaattttacggtgctagttagatatctatctgtctatttatttagagacagcgtctcactttgttgcacaggctggagtacagtggcgccattgtagctcactgtagccttcatctcctgggctcaaacattctcccgcctcagttgagattacaggtgtgagccactatgcctggccattaagtttctcattagagatgtttgctatgtggttaacaaaaattggtgatcttgaattcattttatgtttataatttttgtgaagtttctctaccagtgggtagtgtagggctcgcaaaggtatagtaaagctaggatttgcagtcactgtattgtcatgctaagaccctgttttggatgcttgtgttctctactgtagatgttttaaggatcacgaccactgctgtgtattaaaatcatgcagagtaagggtgctgccctgtgtcttctgttctcacagagatctgctccacaaagagagggacttacatctaggtttgatcagggattgccgtaattttttctgtaaaggaccagatagtaaatatttacagctttatgggcctcatttgatctgcttctgtagtgaaaaagcagccacggacaatattcatagcaatagggagtaggctggatttggcccctgagccaaactacaggggtagtttgttgacccctggtctatatgcagagtgagggagagagatggatttaaacccatcttccttaggccacttcatgtgccctttcatacacattagctcttggattagcagtacctgagataagggtggtatggaaaatagagtctaaaccagagagctgagggcaaacttggcattccttcccttaaaattttatgttagtaatactgtgttggttgatcatgaaggaaataggcatgctttccccttccactgtggtatgcatttatttattcactttatactgttgattgttctagtctataatggcctctgcctctacatgcctgtgacttttatcaataattgcagatgtataagcattccaataataaggccatgactacgggggcaattgctgcaatgctgtctacaatcctgtattcaaggcgcttctttccatactatgtttacaacatcatcggtggacttgatgaagaaggtagaattccttctttctggaaaatggtgggggggaggagttattattccctagatgtgtgtatccatctagagttgaaaagaaccataaataccatctgacacaattctcatttcatttctgataatgaaagtgatgaagaaactgaagctaatgtatgacctccaaaggcacattgaagctctaatagtgaatgttgagcagccagttattttgctattttctcaggaacttgcatgagttagtagtaaataattaggcatttttatcttatagaaagaaatcggacctagaaagcttgacctaaatgtgattctgagtattgaaaatttttttattaacaaatacacttcaaaaaagttctttaacggttctagaagtcatttggggtaattaataataagcatctactccagtgttttcagaactttttgaaacacctctctgattttgtcagagtcagaccaggattccctgagaatattaagtcttgttacttaatattccatcccatttttgttccagagctgcattacgccacatgggcaccaatgttttccatccaaatgttccaatccatttgttctcatttgcaatccaaatgttctcatttggattggcttttggttgcatctaaaaatcaaatacaagtacagtgtcccaggacagatctttgtcacttagagtagtccattgacacagatggataagtagtccatctgtgtcatttagagtagtccattgagataagaagttacagaagtgtctagatgaggatatcattggagtaagcccatcttctgtgttccttctggctgaacctgtggctgaagttgccctaaaagtaggggcagaggaattcctgtaagggactgccccgaacctagttggggttccagaacactaaatctcagggtaatcagtcaaaagcatttagtgctgcagcagtcctctcagcagacagcaggaaaagatgtgtccaaggtgagggagttgatttgagtgttgaaggaatttggttcagggccagggatagtttctgtgtgtttagcaacaggggtaatttctcagtgtttcaagcaatagcctaaacaacattgtcagcgcctgggaatgttcaaggcaggccttggcttgggtcagagcctccaggggaatacatgcggctggccacatcacagaacatctcagttggacacagaaagaaagcaaggggactggggaccctaaatcctgtgagggaaaattctaagaggaaagggtcaagcttcatttcagcgccctgcctctcggttgttgactcctatcgctttctgttccatgagcgttttctttgcgtgcgctatctctgactcttaacatccgcccccatacacagccttggggaacattctgatcattttacctgccatggtttaggcgtagacaaattaggttgacacaatttctttttaaggctttcaaccttacttgaaaaccaagagaaaaagtaaagtgtagaaatagtaaaaatagaaatgaattacctttaacatgggtaattagagtctagctacaaattaatttgcctaacttagcaagctggatgcttctggtgtcttttttgacttacattatgcctggctttaatgtcagattaatagattcagattttagcaacattaaaaatagctgagctgccattgaatttcagcgggccagacagcatcctttgagtttttccgagagttagagagtctaatctgggaaagctgatacctactaagcagcagacctaagattcaggtttggcttttgtttcacttcagagccctgttctttgatttccatgtaacagtgttgctagttttggtgacaacctcaggtgtctctagaactgtctttctaagcttgtctgtctggttggcttttaagtgttctttaaactaatttttattttatagaggaatttgtgtgaataataaagcagtcctctatcttttttttccattgccctaagacagttttcagctcttttacctgtatttcctggtacttacctccattttccaaaactctgtatttgtactgcactcttttgagatatcttttggtgttttgttctggtagatgatggttcttagctcttttgtgtcctcttcctcattagcatcctcctttaacacattacacttttggtaacatagacctttaatgtttttattatgaccagatagatattgatctttgttgcgccaagtagcatgcattaatattttctttcttgtgtaactcgtttttatttttttcttaagttaactatctctaattggctcagatttctttaaactttttgtcagttccttgtacattctctgagtacaattcatctggttgtcagacctcacatactaggtggatcccttttccctttgctccaggatggaccactgccatcctgagattcccccacatcctgtgttctcctctttcttgatttatttccttattttagaggcttacctcctaaaagatttctgaaaaaaacaaaatgggacctttttgagactttgcttttaggatcttttctttaccctggtgttctgaaattgtatagtgatgttccttgcctagagtttcttatttgttttatcctctttctccaccttctttcctctcctcctcccctacccctctgcaccttctccacaaccacctggattatgacccggtactttatttttgactccccatgttatccatgtctgtcttttttgttctactttatgaagatttccttaattttagcttttcatcctttactgattgcttttatttctggtgtcattaatttccaagagcttgtacttattttttgtctttttaaaaaaaatcctgtttactttctttgcagttttctgtatttcatcagaatgctttttttttcatgttgtgtgttcatttttggcctctgtcttctatgttagaggcttccttcaaatctctgatttttttttttttttttttttttgctgtccattcacattgaagagtcttgtaccaaaatttgattatgaaagtccttgttgacatggcttgtcaactgacagccgttaactgggtgcttaagtaagcagcattttcttcagatgaagaatttctttaatcttttttcctgaggtgaggtgggactacaggaagagaagcccggttggcagctttttaggcctcggaggaggaagggggctgaaggtctgtgttttgtttacatcaactttccatttcatgtgttttgctcctaccctttgccactctagagcctggtcccctaagtccagagcctctgctaatgtctcaggagacttcctttactgtcttctgtgttggtggatgcagggacctggagagcagtgctccatattgaaaccttcaggacagcaaggtccacagctctttcccttggtgtcaaccgctgtctgcactaacctctctgtctttaatctcttagctgctctcatgccttttaaaaatttttctcccaaattaaaagtggctttagtttttctgtagtgaaaacaatcagtacatgtttatacatacactcatgtagttttatgtaagtaggactttggtatctgtttttctgtaactatacattatgtattatcaaggagatctaagctatatgcataatgatttttgtatttaattaacaaaaaatttttttgtcttctgtttttgctgctgtaatacatagcatcatttacctaaccagtcctctaaagggcattttggcttcctgttttcttaatgtaaacactatgatgaacatccttgtacatacatttttgtgtacttccccaattatgcttgtcttgctagaataaacttcgagtagttgaagtattgggtcagataaatttttttttgtattttgttgagtatactctttctgaaggatacgccagtaccctgagtacccgattttatataaccttcccagtattagaattaacacattttgaaacatctttttgcctattgaacagtttattattttcatttatatatattcttgggcatgttttcatatgtttattgactttataaatttcctctttggagactgattcatatattaactgttgcccatttccttatttgcaggttagttttcttcttattgattttcaagaactacattcgactgtgtcaaatgtctgtgatattatagatactcccaagagtgttatttgtctcttttgggtggtgccttttgctacacagaaattgctgtgtttcatacagtctaatctgtcaatcatttctttatgacattcagtttcttgccttgttagaaaaacttctcccatccaaagcttagctgtatttcttttaagacttgtctgattttattttttacattgaaatgattgtgctttttggattttactttgatgaggaaaagcactttgtaatcaagattcatgccattctacatttatttttgtttttatttattgatttttgctgttttatactgattttactagtgtctctcttgcttcttctagggggtctttaaagctgtgttcttggacatagcccaccctttctttggtttatttttttaaatttgttgtgtgtggttttctgagattggttccatccttgggtaaagcttttgggcctcagtttacttgtggcctgtcatcctcatgagagatacaatcatttttctgcctttacaccttacatctctttctttttttgtatattgaggttagtggattgcctgctgtgatctcatgtcttgtcccaagcttgcttccagcaaaaatacttcccagtttcttaggtgacctcagatggtgccttctccaccagagaattcagtttacacaatcctttttctttttttgagaccaagtctcgctctgttgcccaggctggagtgcagtggcatgatctcggctcaccacaacctccgcctcctgggttcaagcgattctcctgcctcagcctcccaagtagttgggaatagaggcacgtgccaccatgctcagctaatttttgtatttttagtagagatggggtttcactgtgttggccaggctgatctcgaactcctgacctcgtgatcggcccacctcagcctcccagagtgctgggattacaggcgtgagccaccgcgcctggccaagtttacacagttctatagtagaaaacatacaaagctaacagtggcagttgtacatggttagtaaggagattgtccctatatcacatctcccagggtactgagttctggtatataatgtgttttctaaatcagttatgtttttaaaaaatcataccttgtaaatgactcgtgatttctcatacccagaacacggttgtttttaacaggcctttttaacgattgtagaatcacctgtgttctttgtaacaaactcaaataagatagaagcacatgaattaattcccttcttttcttgcctctaattcagagctcaaagatgaccagccacagttacttatctttccagacttttttgtgcttgtacaaatagttttcttattcttttaaacaaaagcagtatcgtattttacaggttacagaattctcttcgttttactgtgtcttgcggatgtgtcccttggacctgtctatatacataagtcgtgctttccttcaagttctcctcttcgttagcttaggagagccaagaaataaagactttcttacaaatgactgtttgagtttggctgatgtgtcctacagaaacctcaccatctctctctctgttctccctactctcttacgggtccttacctactaccatggcttggattatttttgtgtattctcatggcttccaactgttttacatctgcagtggttaattctcttgtcatctttacctgaagatcataaaaatgcctttctccctcttacccaccctttctgtgttactcaatattgtattttaactcccaagcctacagtttacccttgaacaacacaccaacacggggattggggctgtctgctgggtggcacctgtgcaatggtgactgggttctggctgtcacatgtgcaacagtgtgtgtgctgcagctgtcaccagtgcaacagtggctgtgttccaactgttccctgaagttttagccaaggtgatagtccgttttgtgtcacgttttgacctgatttatttttgcgatgatttgggattgtgattggataccatccttatgaatactgttttcttctttaaggaaagggggctgtatacagctttgatccagtagggtcttaccagagagactccttcaaggctggaggctcagcaagtgccatgctacagcccctgcttgacaaccaggtaatgatactgtgtccaggtaatgatactatgtccaacttgtcatggtgttcagttgaagtgccttcctccaagttctcctcttcattagcttaggagagccaagatataaagactttcttataaattactgtttgagtttggcagacgtgtcctacagaaacctcatggtctctctctgtgttctgcctactctcttgtgggtccttacctactcccatggttttgattgttttcctgtattctcatggcttccaactcttttatgtctgtagtggctaattctcttgctgtctttacctgaagatcataaaaatgcctttttccctcttaccccccctttctgtgttacccaatactgtacttgaactcccaagcatacagttgagccttgaacaacacggggattggggcgccagttccccgagcactggaaaatccacatataactttcgactccaagaaaacttacaaataagcctactgttgactggaagccttgccaataatgtaaactgtggattatcacgtattttacatatgtattatgtgctgtattcttatgataaataaactacaggaaagagaatgttattaagaaaattataggaagagaaaatacatttacaatactgtatttgttgatactgtaagtttacatcatctgtttacaaggagaatcatctgtctggagtggtggacaaccacagctgcagacctcaatctacagtacatatcaagcaattcagctttttcttgtgatgtcataactttccctgcttcttggggagcagttccagcatcactaatagtgctttgtttgggccacttgttatttaaggtttataataatcgcactaaacacaatgaaaaacaaaggagaacattgagagatcactttaactttttataatcagtttatgtgtattttatggtagtaaatgataaaatagctagtatctacatacagtttatacatttgtggcatacctttctcttaatttttaaggtatttttaggctacttggctcatctgagtttttcaaagtgttgcgagtctccaaaaacttctcagtgtgtttactgaaaatttatgtgtcagtgggcctgagtggttgaaaacggtgttattcaaaggccgcctgtatttctaattcgtccctctttgtgattactgctggctaaattcagacctacattattagattattggatttatttcctaacatcctttctgcctacaagtttacttccctaattcctcctgctcagttttctgaaggatgtcatatatagctactcctctgcttattgcttattgacctcatctcctgtcaccccactacacccagaccctaactctgcttttctcagaaaagatgtgcttttcctaactccgtcccacatcttcagtctggaatgttctgtgctcttcagtgtagccttcagcgctcacctacttaaaagtcctttctgctgaagcctgtcttcttctaggagacttagtggacatctgttggggctctcctggctcttattttcttcttagttatagcaattctctgatcactttgcttgcatacgtccacctctccgggtcatgtgcttctcaagagtgggagctttgccagggaatcgttgtcagatttctgatgtgtgtaattcatccaggtctggaagggtctttattcagtctgaaggacattttaattttgtatagtattttcatcacaaatcctcgtacacatgagggtattggaagaaacttgaacctttcctttgtgctcactgtcacatgacatctcacccaagtttcatgtcccaccaggttggttttaagaacatgcagaatgtggagcatgttccgctgtccttggacagagccatgcggctggtgaaagatgtcttcatttctgcggctgagagagatgtgtacactggggacgcactccggatctgcatagtgaccaaagagggcatcagggaggaaactgtttccttaaggaaggactgatctgtgtgctcttatcaccaatcagttcagacctggttgattttgtactttggaactgtaccttggatggttttgtttattaaaagagaaacctgaagtactcattttgctataacttgtcttctctaagcaggacagatataggaagtagaatttcttttaattttcttcatttttcccacccttttctatttttctgagatttttttttttttttttttttttttttgcattttaagtaatgaaaacaggtcatgttaattttcccttacactaatgaggtaggaatttctctgtaaaagttgaccttttgagcaaacttatcttatgaagagggctctggtgtttacgcagccagcttgcctgaagggacctttaaaccatccagaagggagagtatttactagggttttattaagactctaatggttataaatgaaatatcttaagatttttcacttctgggactgttaagccatctggaatagctattttggagaaaaatcttcaaccaaaataaaactgtaaaaaaaaaaaataggcctttatacaagctgtagccagaaatctgggataatttttacaagcactttagtaatgttataattgagacctaagttttgatagagccaaaattttttagatctattaaatacattttaactccattataatatttgagtaattttcttgttattgaacaagtcaaattatatgtaacatgggagttattgtatgctttgtaccagaacaacctgtggtataaatggaattttactaagttagtggttaatcttagataccacttttgtttattttgccttttataaataattcaaattatcgaaagctgctagtagatacacattgtaaacatttattgcacaaacatcaatactgtcactcactatcccaggcattggggacacagtggtaacacctggttcatctcttaacagtgtctgtatgaggattctccaaagactcagaaccaataggatatgtttgtatatagagagagatgagaaagggtttattaaagaaattggctcactcagttattgagactgagaattcccatgcctggctgtctgcaagctggggagccagagaaactggcagcatggctcagtccaagtctgaaggcctcacaaccagggaagctgatggtataacccttgaagtcctgaaaataaggagttgggtgtgaggggttgctaatcaagtccctggctcgaggagaaagacagtgaattatttgcctttgccttttggttctatctgggctccattcagttggatggtgcctgctcacacaggctgatctgcactcagtccacaaactcctaggccagtctccggaaacatcctcacagacaaacccagaagtaatgctttacctgctgtcttgatatcctttaatccagtcaagttgacacctaaaattaactatcccaatgtcccaactaaaaactgtagagtatcccaatttcaaatctacattttttcttctttatatacactaggtatattcttattctaaaggatttcccattttggaattttctgtttatataaagttgtgtatctaggattttctataaggttctcacctcccaaggtgtatagggaagttctacaaattgagtaatgattgatggcacataattagtgttccatgatgtttttttacaaccttcagctaacattgttttaatccagtattgctgtagactttgaacatggtcttagttttggagtgaacacgacttagtccagaatgtgtttggcatatggctcctagagctaacctggctactagttatttgggtagttttatagatcattcaggcacattccttgtgtgaaaagaaaacctttgataaacattagaagtatgattcattcttaagagttaggcttgaagattccagtgagaagctgctgatgtagagactttctcttcattactgcctgcaaggggattggaagtatctggtaatattacaagtgattgatggaaaactgcttgagaggttggccatgactccatttatacacacagaatgcacgtagatgtttggatttgtcttaattatccgacagatggcataaatactttccggcagtctgctcagtggggctgtgctgacttgggaggttagaaacaaactgagcccgtgactgccaggtaccactcgtgtctccatatttcccatgcagcaatagctcctgctgtagtcacagtgactttgcaagcctacccaaggggaatgtagacaatttagtaggaaaataatatttcttaccaaaatgtcttggccaagcacagtggcttacgcctgtaatcctaatactttaggaggctgaggtggggaaatcacatgagcccaggaatttgagaccagcctgtgcagcatggccaaaccccctctctacaaaaaatgagccagggatggtggcacatgcctgtagtcgtagttactcaagaggctgaactggaagaatcacttgagcccaggaggtcaaggctgcagtgagctgtggttgtgccactgcactccagcctgggtgatagagcaagaccctgtctcaaaaaaaaaaaaaaaaaaggcataattattaccctgataggtttcctttttctgcctttctgtacctgttacctgggtgagcacttaatggcccaaaagtgtattaacatgctttctgattctaggtctctcattccttgtatttgtgaatttcaaactgtaactggaagattccctgtatcagaattacgtagagcacttgttcaaaatgaactcctaggttcaatagacctattgtcccagtctctgagctagaaatcccaggtgattcttatgcatacacaatttgagaacttctttaactcctcatcagacaggttcaatcagagaagccctaggagacataaaaagatttattacagagttcggcctcacataagaagagctgattagatgatctatataagcctgtttctgtttggtgctaggagcctaaaacccatagcacaggctgtcaaaggggcgatggtgcaaaaggaggagggtcaacagactggattgtgacctgggaccatgggggacacctgtggcagtcccactaccttagaactttcacttagtgatcaggtactggcctcctttttcatggctagacatgcacctggcccaagagcttgggagaagttgcagaagggcctgacaggagcttaaggagctgggaccccatatgcagcccatgccgccaggtgagtcagcaggtaaagaacacgcgtgagcggtgacagcccatcatgctctgctcagcagcacaagagcagatggctgctgcctcactgcaccttctgcatcttaggctcctttctctgagtgcaaacccaccagagctgttcagtacccatcggtggtcttcattactgcacgaagtccaagtctttctccgctttgtgaaattaattcaaacttaaagctgttggaacttcaaattattctgagccttgaaagacatgtggctatgcagagcctgagttatgcggcatgcaggcgcaacttctgccttttcccctgtaaacaagacaaaaaggcaccagacataagacccctcaaatcactactcctccgcacagagtaataaagtaatcttggaatgagcagcaatctataaccaatcaaattgctgtggcgaatgcactggtcttgtatggaaaatgtgatcctgctaaaatttctaagtgaaaccttaacttctccactttgaaacattaaccttactggtttagagtcagtgtttccaggtggccattctcaagctctgcactcgaattaaccctctacttaatcatattttctaaatctcattatttaaggttgatagttttcagatccctccacgccatcctcgcctcccccacccaactccctacctcttcaacatacttctttaactagctgggctgctttgttaagtgggtgtgatattctcattcttcagtgattcagctaacattgtctgactttgtgtactgtccccttgaactttataaatcatactcttaaagtccagatcaagttttattttctctattgagattttcccaacttttctagattttatgaatttcttctgagcgtctattaacttgatacttgtagtttatattaaatatgaatgcaattgtttgctgttatttcttaaatattgcccctcccatttacttttcttatatatccattatacgaagtctgaacacataggaggcacctaaaacctataaagagacatggaacttgtttaaaggacccaggagtgatccgtttgttagtgttgattgaaaatccatcctgctgcctacttctggttgtgagagaaacattaaatctgtgagcagtgcaaacttctttccatccctcctctggagttcctagcagcaggcctgggtctaaacgtgggaaggagcttcaaatcttttatttcaagttgtcacttctatggaggggtagtagctctgtccatgggcaatttggaatgttggaggagcctgaaggcaagtggagttaggaatacaagtgtctcacccttgagttccgctcagcagaatgaagagtatgggtgcactgcttcacccacaggattgcgctgatttatctgttgacatactgtgctagttttctccctagaccgggaggaccgatagtgtatgtgggtgcatttcaaggcagccactttgtatggccactatgtccaatgaaaggagaggcctgtggccccactcttgtcatgagcaccctcccagccaggctcggtgtcttgtgcctcctccgccagacagagcttcatgtgcatctgctccactcttgaatgagtttagctgccaatttgctctcccttgtctgaatggctcctggagcttgtgaatcatctttgaaaaatatttctataatgggaaaatattttaaaaacagcatggggcgtgagcagatgtccacagggctgattgttagaaagtataggtgatcgaaagtgtgatcctcccactttgtcctcaagctgaccaatggcctgacctcttctgcagtgagaagctgctggagagttggctgagggtcaggaaatcaagggaccttcattcttcaatgaaagccaggctccacatcaccctccaagaggccgccagatggcagtgttgactcatccagcctctgtgagaaccacagttttctaatgctcagaaaactgctaccacagttttccagtgcacagactttactgagtgactaggaaggggccttgagcctaatcattaatcctgttttataacctggaaggaggtacaccttgttgctgtcctaaatctcagctattcctcagatcaaagcggaaaggacagaaggagataaacccagcaaaattggtagtaacctatgctggaggtgtgcaaaattggtagtaacctatgctggaggtgtcctaggtgtatgcaggggttgggaggtgggtgggtgggggagagggaaagggggagagagagagagagagagagagacagggagagagagagaaagaagaagaaggaggaggaggaggagagaagggagcaggggactggttgtggtttggagagacaaaaatcagaacacagaatttttttggagctatatactttcataaacaaggaaactaatggacagagaatacattaaagtgctctgtgcaggctgctgactagtggcagaacagattaagactcagtgtttagtttttctacttctctctctctctctgggtttcagtgtttagtttttctgcttctctctctctctctctttctgggttttctttgttttgtgctatcaagttcttcttatttcttttacttcaataaatttctttcaaatgaatctaaatgttatgatctaaggacacaagttgataaatgcaattaagattcttggttgaagattttgtgtaggtggtattagtagaaagtatccacaaagtcatggagcaaaatctcagatttacaaagttctaggtctgccttggccttccaaagtgttggaattacaggcatgagcccctgtgtctagccttatattgacatttttcacttgcattttagaattgattgttgagaaccccttgagtgacctaggtcaagagactgctgatctgtctgtgatgggtttgatatttttttctcctcaccaaaaatgctaagaacattcatttacaaaactggagacattggtaagctcttacctttctcatcctgtgggactgcaccagcctgtcttactgcttcctgggaggttctatgcacaaattctctgggaccttctcaggttaggcaagacctccagaagacctaccagctatcttgctcctgaagttcaaggctctgaaagccttaaatgtcatgaagcatgaagcatttccaggaaatttgtggttttctcttgaaacttcccaaagagaactttttctgaaaactgtttacagcaatttgatggagaccagcatttccgagggcccagaggaaggatcagagaacaaggacagtgacagggggatttggtcatgagagtcagaggcccgtgtgatttgcaatactcctttctggaagctctaacgaatatgaataatcaaagatgccattactgcataacaagagcattggacactaaaatataacttttccgagaaattgaaatttgcttatttatgttgtttatttaggggtatggtcagggtattttattcagacacttagtgtgctcaatttattcattttttcaacagtatttctggagctcctattatgttctaggcactataaagacacatgcacacgtatgtttattgcggtactattcacaatagcaaagacttggaaccaacccaaatgtccatcagtgatagactggattaagaaaatgtggcacatatacaccatggaatactatgcagccataaaaaatgatgagttcatgtccttcgtagggacatggatgaagctggaaaccatcattctcagtaaactatcgcaaggacaggaaaccaaacaatgcatgttctcactcataggtgggaattgaacaatgagaattgttcaattgttcaattggcaatgcagggcctgggaaggagcttcctgcaggccgaacagaaacaaaatgacacttccctccattctaagccaaataacctagtggttcctgtatgtgcctcagagtgaaattgaaatcctaaccctgaagtcattttgtagaggccttaagcttcttgttgtgagatgtttcctggttcccttcagaaaagggctctgacagggtttagcagaactattgatggacgacttggcatgagtacatctggatacatcagaactttgtcacaagagtggtgttttagttttaaattccttaaataaccaataattgggacatggttaagtaatttatgaaatgttcactacatgaaatattttctggccattaaaagtggtggccatgaagacctggcagcaacatgtcagaatattaacgcagaatgctaaatgaaaatcaagagtccagaattgtacacaatgactgcaggtgtgtgaaaacatgaaaatgcagacgaagaacatccaaattaatgtagtggactggccccctataaatgaaccagtggactggttcattttattgaccattttaggacaagactttatacatttggaattctatatttaatagctccccttgaatttttgcatgattttaaaagaccaaccaaacttcttataatacttaagtttgattgtggctgcaatctagcaatcaatttaatgaaaaatatctaactggaaactttgagttgataaaaaatctgtttgatagattatttcacttttaaatagcctgttgctatcaatagatacatctgatcatctcctaattagtaaataatgaagactgttgttttcataagtattaataagccacagatattctgggatgggttgctggcaggaggaagatgttgacttgctaactgaggagtatgaacccggtcagtgctgcttctgtacataaagactgttagtttagatgatggcctcaccaaaataatattctgatttgtctgcttgattatgaaggtgcacaattagcaagaaaaatctgagactttttagacagacgtatacaaaacctctgggttgtcttgagaaaacccagaaaaccgacttctctcaggcttcatgaaggggaaaaggtgttttaacctttagcacatgttacaaaaatctaatacggcaaaagatattgagaagtggagagtttcactaaaaattattgggctaataaatgcttagagccaatatgtacacacaacacacacacacacacacacacacacacacacacacaaaggaaaaagctaatggaaaacaactaagccctattttattccgttggaagccgtgagcaatgccaagtgtccacacttaaaaatgagatacaaacacgttttctctcatgtttttcacaaatttgaaggaaacaattatcagtcaagacttgtcagaagatttggtataaatttaagggcatatttactttctcttgtcactttaacaagtttatgttgtcccgtgtcccttataaatctgctagaaaaataagtttggaatttcaaagtagaaaaaccttggaaataagatcttcagtggcttgaagtttacacccagtctggagctagggcctccacatgcatcagcacatctcattcttgtgtgaaaatttttaaattgatatgtagtatttgtacatatttacagggtacatgtgatattttgttattgcataatgatcaagtcagggtatttggggtgttcagcaccttgagttcatcacctttctatgtgttgggaacattccaagtcctgtcttctagctattttgaaatatgcaaatattgttgttaactgtagtcaccctactctactgtcgaacaacagatctcactccttccatctaactgtctgtttgtacccattaatcaacctctctttctcctctcccccacacataccaccttcccaccctctgctagcgaccgttctaccttctactcagcacatctcattctgactcttccatctgatgtgagcaagtctgtcctgaattagagctgttttctagagggcaagatcttatctttgtttattatttaaagtgtccagcacgctttgatttattactaagcacgagctattttttacttgaatttctataatgctttgttattcattcgtgttttttattatggaaatgtcaaataagccccttgtatatttcacccaccactattcatggtaatcttattatcgttgtttattttgaagtaaatcctataattttattagtaaatattttagtgctcctaaaagataatgatcgcatttaaaaatataatcacagtatcacaattgtacctttaaaaattaactataatccctcaacattcaatatgcagtccatgttcaaatttccttgattgtctcataaatgtctattaacatgtcattcaaatctggaaacaagcctttttatctctctctctctctctttccttgaaatttacatgttgaagaatccaagtcgtttgtcatgcagaatcttccacattctagatataaatgattgcattcctgtaggttctgtcctgtcttttcctataaattggcagttaaatttagaggcttgattagattatgttcaatttttcatcaataaagcaacttatgttcatataaatcttatcattgcttagatgaacaaattagacctgtttctttttcttttcttttctttttgagagaaggtctccctctgttgcccaggctggagtgcagtggtataatcatgtctcaccgtagtctctacgtccctgggctcagtggtcctctcaccttagcctccttagtagctggaactacaggtgtgtgccactatacctggctaatttttgtacttttggtagagacagagtttcaccatgttgcccaggctggcctgaaactcctgggctctagggatccacccccctcagcctctcaaagtgctgggtttataggcatgaaccacagcacctggcccagacctgtttgtattggttaaatgataatgtactagaggagaaatcttttttgtgatatgacatatctcaaagtatcattgatttttgagtttgtgtcaatatgagataaactttagtttctaaaaatagccacaaactttctttagatcacagaatcacagattccacttgggcaggacttgagcctctcactcatgtagggcccctttccaccttcctggaggtatggtcacctgtcctttgcgtgaccaagtcgggatgaggagttagttacacgcagacaggccactggtaagtctctcacagtattccagcttttccttcaaggcatttttcttctagggttgttgtctattttgttgttgttgttgcctgtttgtaacaggtttctattctatcgtgttaccctgctctgtgttaataatataaatacctaacaaattttctagactatct

SEQ ID NO: 150 - DNA, 1038 bp, Homo sapiens
cgcaggcgcagccgtgcgatgttgtcctctacagccatgtattcggctgctggcagagacttggggatggaaccgcacagagccgcgggccctttgcagctgcgattttcgccctacgttttcaacggagggtaaaaaccccagagagctgcggctttcactttcgcccttcccccatctgctgaagcctatttaggagtcaccgccgtgatggcgctgccccgggctcctgcaggcctcagaaccctgagctgagggggtccgcacaaggccggtctccctgccgtcctctcatgcgctgtgtttccctcttcaggctcgctttgctcaagtttacttgtactatactggcaattgctggagaagattttgcaattgttgcttctgatactcgattgagtgaagggttttcaattcatacgcgggatagccccaaatgttacaaattaacagacaaaacagtcattggatgcagcggttttcatggagactgtcttacgctgacaaagattattgaagcaagactaaagatgtataagcattccaataataaggccatgactacgggggcaattgctgcaatgctgtctacaatcctgtattcaaggcgcttctttccatactatgtttacaacatcatcggtggacttgatgaagaaggaaagggggctgtatacagctttgatccagtagggtcttaccagagagactccttcaaggctggaggctcagcaagtgccatgctacagcccctgcttgacaaccaggttggttttaagaacatgcagaatgtggagcatgttccgctgtccttggacagagccatgcggctggtgaaagatgtcttcatttctgcggctgagagagatgtgtacactggggacgcactccggatctgcatagtgaccaaagagggcatcagggaggaaactgtttccttaaggaaggactgatctgtgtgctcttatcaccaatcagttcagacctggttgattttgtactttggaactgtaccttggatggttttgtttattaaaa

SEQ ID NO: 151 - protein, 217 aa, Homo sapiens
MRCVSLFRLALLKFTCTILAIAGEDFAIVASDTRLSEGFSIHTRDSPKCYKLTDKTVIGCSGFHGDCLTLTKIIEARLKMYKHSNNKAMTTGAIAAMLSTIKRRFFPYYVYNIIGGLDEEGKGAVYSFDPVGSYQRDSFKAGGSASAMLQPLLDNQVGFKNMQNVEHVPLSLDRAMRLVKDVFISAAERDVYTGDALRICIVTKEGIREETVSLRKD

SEQ ID NO: 152 - DNA, 1479 bp, Homo sapiens
atgaacagatctaatttggcaagactagatgaatttgagaggagtaaaactggaggacggaagtttcgtttcaggaatctaaggttgaggcaagagataatgacggcaggatttaaagccattataagtatgattagagatttatccaggaccttcggtggcttcaggccactttttgcaaccggaagtggcgtaacgtccggtcaaggcagccatctcgccgtgagacagcaagtgtcggatccgcaggcgcagccgtgcgatgttgtcctctacagccatgtattcggctgctggcagagacttggggatggaaccgcacagagccgcgggccctttgcagctgcgattttcgccctacgttttcaacggaggtactatactggcaattgctggagaagattttgcaattgttgcttctgatactcgattgagtgaagggttttcaattcatacgcgggatagccccaaatgttacaaattaacagacaaaacagtcattggatgcagcggttttcatggagactgtcttacgctgacaaagattattgaagcaagactaaagatgtataagcattccaataataaggccatgactacgggggcaattgctgcaatgctgtctacaatcctgtattcaaggcgcttctttccatactatgtttacaacatcatcggtggacttgatgaagaaggaaagggggctgtatacagctttgatccagtagggtcttaccagagagactccttcaaggctggaggctcagcaagtgccatgctacagcccctgcttgacaaccaggttggttttaagaacatgcagaatgtggagcatgttccgctgtccttggacagagccatgcggctggtgaaagatgtcttcatttctgcggctgagagagatgtgtacactggggacgcactccggatctgcatagtgaccaaagagggcatcagggaggaaactgtttccttaaggaaggactgatctgtgtgctcttatcaccaatcagttcagacctggttgattttgtactttggaactgtaccttggatggttttgtttattaaaagcattttaagtaatgaaaacaggtcatgttaattttcccttacactaatgaggtaggaatttctctgtaaaagttgaccttttgagcaaacttatcttatgaagagggctctggtgtttacgcagccagcttgcctgaagggacctttaaaccatccagaagggagagtatttactagggttttattaagactctaatggttataaatgaaatatcttaagatttttcacttctgggactgttaagccatctggaatagctattttggagaaaaatcttcaaccaaaataaaactgtaaaaaaaaaaaataggcctttatacaagctgtagccagaaatctgggataatttttacaagcactttagtaatgttataattgagacctaagttttgatagagccaaaa

SEQ ID NO: 153 - protein, 239 aa, Homo sapiens
MLSSTAMYSAAGRDLGMEPHRAAGPLQLRFSPYVFNGGTILAIAGEDFAIVASDTRLSEGFSIHTRDSPKCYKLTDKTVIGCSGFHGDCLTLTKIIEARLKMYKHSNNKAMTTGAIAAMLSTIKRRFFPYYVYNIIGGLDEEGKGAVYSFDPVGSYQRDSFKAGGSASAMLQPLLDNQVGFKNMQNVEHVPLSLDRAMRLVKDVFISAAERDVYTGDALRICIVTKEGIREETVSLRKD

SEQ ID NO: 154 - DNA, 757 bp, Homo sapiens
ggcagccatctcgccgtgagacagcaagtgtcggatccgcaggcgcagccgtgcgatgttgtcctctacagccatgtattcggctgctggcagagacttggggatggaaccgcacagagccgcgggccctttgcagctgcgattttcgccctacgttttcaacggaggaacagacaaaacagtcattggatgcagcggttttcatggagactgtcttacgctgacaaagattattgaagcaagactaaagatgtataagcattccaataataaggccatgactacgggggcaattgctgcaatgctgtctacaatcctgtattcaaggcgcttctttccatactatgtttacaacatcatcggtggacttgatgaagaaggaaagggggctgtatacagctttgatccagtagggtcttaccagagagactccttcaaggctggaggctcagcaagtgccatgctacagcccctgcttgacaaccaggttggttttaagaacatgcagaatgtggagcatgttccgctgtccttggacagagccatgcggctggtgaaagatgtcttcatttctgcggctgagagagatgtgtacactggggacgcactccggatctgcatagtgaccaaagagggcatcagggaggaaactgtttccttaaggaaggactgatctgtgtgctcttatcaccaatcagttcagacctggttgattttgtactttggaactgtaccttggatggttttgtttattaaa

SEQ ID NO: 155 - protein, 203 aa, Homo sapiens
MLSSTAMYSAAGRDLGMEPHRAAGPLQLRFSPYVFNGGTDKTVIGCSGFHGDCLTLTKIIEARLKMYKHSNNKAMTTGAIAAMLSTIKRRFFPYYVYNIIGGLDEEGKGAVYSFDPVGSYQRDSFKAGGSASAMLQPLLDNQVGFKNMQNVEHVPLSLDRAMRLVKDVFISAAERDVYTGDALRICIVTKEGIREETVSLRKD

SEQ ID NO: 156 - DNA, 118063 bp, Mus musculus
  misc_feature (1)...(118063): n = A,T,C or G
ctgtctgtttatcatcatccacccctcatccatcctttcgtttatccatctgcacacatattaaaacccatgaactcatccaaacgtctgtcacagtttaactcttgaatgtctcccaaagacctgtgggttgaaggcttgtattctgtaggtgggcctaggggtagatcgttaggtcactaggggtgtgctgttgaaagctgaaactggcccctgccctctccccgtgctttgcttcctgctgggagataagaactcttcctacatcccaggcctcccagtcgggtgaggtgctatattgccacgaatcatgacaccctggaatctcaaaagctgtgaacccaaatcattgtttcccttccataagcttttcaccctagggatttgctctcgtggtgggaagctatcagaaccctcgattccatttctgagccacctgccttgtctaggtcccccgtctctgtttctaacacctcctcatgcccagcattccctagtcatagcatcctaccttctcggaaagatggcagacggtgtgtaagacagtgatccctgaagatgatggcaaggctggaaacctcttgcagggacagcagactcaacatggaactatttcacatgctgcccgagtttgagaggagactcctgtaagcacgcctgcagggctgtcagcacggagaagtacagcacactcattcccagccacttggaacgtcactgcatgattggctcatgcacacacatacttactatgtatgcttttaaaagggtttgttattttaacaaattgtgtgggggggggggagagaaagaaagtgcagggggcctgggagggtggtatctgcacaagtgtgcaggtgcctgtggaagccagaggcattgggtcccccgatatggagttacaggtagttgtgagctatccagggaggatgctgggaactgaactcaggtcctgtgaaaggattgtaggtgctcttaagcgcagagccatctctccgggctccacactatctttttttaaagctctgtttcagagacatggagggtactggataagggtcgcagtgcaaagactctgaggcaggggcatgtcttctgtgctggaggcctgccaaaatttcacaaagcaagcagaggaaggaatgggaaaggaagtcagatgtgacgaaaggcaagccccttaggtggctgctgtgggaaccactagtcccttactgtgtgagcttcgggttttataggtagaggaagaaggctcctgacttacaaggccaggagtaggatgtatttgacaagaactagggcaggaatccatctgataacaacatttgatttaggtgagagaaggcaatggtgacttaaattggttaatggccaatgtaatgtcactagagggactttaatctggattaatttttagtttgtttgcttggttgtttggcttttccagacagggtttctctgtgtagctctggctgtcctggaacttgctgtgtagaccaggcttccagatggtcgcctgcccccaccccctgcttagagactaagaagcccctctgttgggcctccttctccaaccccagctccactcttgccaccaggtagagcgtcagactgctaattgtcagagcaggatgtgcttcccctacccttttgctttgcatgatgggaatttccctttagtattctcagactccccttaactcccatcagggttgaagggtggattctgactgctgagttaggggtcgggttttagttacttttctatttttgtaacaaaaccccatgatgaaggcagctcataaatagagcatttaattgggcttgtggcttcagagggttagagtctgtgaaggcagaacaaaggcatggtggtgggaacagccatcttcttttatttgttgagacaaggtatctctatgtccaccattctcaacatgtggctcatgagtctgttggcaaacttctatttccaaaaatatttacattataattcataacagtagcaaaatcacagttatgaagtagcaacaaaaataattttatggctggagttgccacaacacaagaaactatgttacagggtcaaagcttaagaaggttgagaactactactctatgtagccttggctgtcctggaactcactatatgtagaccaggttggtcttaaagtcagagagatccacctgcctctacgtccctagtgctgggtttaaaggtgggtgccaccacacctggtttgagagttcacatcttgatccacaagcaggaggcaggaagaaagacagtaggattgtctcaagtctttagaagtttcaaagtttgccccccagtgatgtactttctccaataaagccacacctcctactccttcctaaatatttccaccaactgaggatcaaatattcaaacacaatcatagggtccactcttaccaaaacactacatctgcacgctggtccccataggcacatggccatatgacaatgtaaaatgcattcagatccaacttcaagtccccatagttcaccatagtctcaacactatttagtaacaaattacagccaggcaatggtggcaccagcctttaattccagaactcaggaggcagaggcaggtgaatctctgagtttaaagccagcctgtttgaggtcagagctagttccaggacagccaggactaatatggagaaaaattacaaaaaagcaaattacatactttcaacatacagtgatatggaatatatattaccattctgaaacagcaggaatgggatgtactggcctggagcaaacttgaaacccagccgagctagatctcaatcctttagctccatgtctggggtcagaggacttagatagctccacctttctggtttttcctgtctgcaatgtacttttctttcttgggccagtaccactccctctgtgcagccagccacctggagtgaagacaaaacacaggccagtaaaagaatgctctatgtcgggctatctcaaactctagagtcaactaccacaacctgacctagcttaaaatgtttccaaaccctcactgcctataaaaaaaggttttgttttgttttttaaaaaaaaaaaacatttcacatggctctccatatcctttactgtttagctccttcccagtcagcccccctgccgttttccagctccttacccagtatgtagactctgctggccactgctgtcaccagataactggggaaagcaacttaacggaggacaggttatcttggctcagtcttagagccaagggacacccatcctggtggggaaggataatggtaggaacatctcggcctatgccgtctgtcagagcatcaggcagaacgcttggggtcagacccagcggtgggaattgccttcaaaggcctctaaagtgctacttctacccgtaaacccatctcctaaagaccccacaaccttcagaacagcaccatatgctgggggaacaaggcttcaaatcatgagcctgtggagacatttcagattcaactcatagcagaaactgctttatgagaaaaacccgtttcccctgcccctaattgtgccaccagcaatgttccacagaggtccatggagacccagggccttagtcctcagacactgaaacataggtggtgttttgggataatttgttacacagcgttatgtctccccatgactaatttcttcttgttcttcctgccttggctcagacccctcttcttcctggaagctctccctaacttcctgtccaagccatcatgttttagtcttccaatatcccctgcactgtctctagcaatactacctggggctgccttagagagcaactctactccatctgacttggtgtgtgtacacaggataaggctgtgcacccagagacacaggtacctctcctcctttccccttctcccctcgcccttttcctctcccccctcccatttgtcccatgccctccccttctcttccgctctcctgacatggacagttagcattaatttgagatgatttttaccaccttcagttggaagagttcaaacacacccatggcttagctttgagggcttcctcccctgggactttctcctactctgtacctgacattggtacccacacctttactaacttcctccccagtttcttaacatcagagctatgccatgctcatctccacatgcagaacatgttccacgaagaggtaccagtgactagctgtctgcataaggaatgagcaagcaccttctggctggttagaggacttcagcggagcaagaaagaatagtcacattttcagagtcctgtttcccaagatctaagttcctttaactcatcactgagtttttgacaatggattattgtattttaatccttcttcatccagatcaggctgagccagccacgcctatagaacaggaactagtatctcattacagaaaacaaacccaacccagatattccctgcctaaaacaacacgcagtgatgtttctggcaggaatgggtagaagagagtgagcatgtggggtcaaggaagcttttcccttagggacattctttttgtggattcatctagtcagcaagcgtttaatgagcacctactacatgccaggcatttcccatcctcaacttgtagagcagcacatttgatacctgctgttgggtcatggatcaggcacatttaggggcttagaaaattgctatcctgtaagaatcaactgggttgcctctggtcaacacatctcaaaagcccagtcaagctatcctgtcgggttgcaatgtcccaaaatgcagctggagccgacctgtccctgactgatcacatgcccatggatgctgttgattcagttgcaagttatcacatggcatccctggagggcagcctcacagccaggcagctcccttctccaagtaactgacccaagaggtagtgagtttctgtctgagacagaagctgctatcttctgtaacatcatctcagaaccgacatcaatatgtgatgttctattcatttggcacaagctagtaaatctagcccatgcgctgggggaggggatggcccaggaccccaggacctgaggtcacaatcagtagtgcagcctcaggcaatctgccacaggtataaggacttaatacactttagctcaggcctggagatagccatttcaacaactcgtccaggtcacccagctagagacttctctgactctaaaagtggcttgtccaggctggctggggtgagggaggaaagagaatgccagtgtatgtcccttaactgcagtataaccgatttcccacaattcagtggcttaaatgcttgttatgatatagtttctaggggtcaagatttaggagcaatttagctggggaattctggctcagggtccccttagaactggagctaaagtgtgggccaggctgcactctgggctgtgacctgggtcagtagacttcctggagggctcctcacctggctgtggcaggagccctctgagagaaagcatccttaaggcatggtactgggatttccccagaaaaagaggcctgtgagcccagaagctcggaatacccaagatacaattcgcaaaacacatgaaactcaagaagaaggaagatcaaagtgtggatactttgatccttcttagaagggggtacaaaatgcccatggaaggagttacagagacaaagtgtggagcagagactgaaggaatgaccatccagaaactgcaccacccggggatccatcccataaacaaccaccaaacccagacactattgcagatgccaacaagagcttgctgacaggagcctgatatagctgtttcctgagaggctatgccagtacctggctaatacagaagtagatgctcacaatcatccattggactagagggtccccaatgaaggagctagaggaagtacccaaggagctgaaggagtttgcagccctataggaggaacaacattatgaactaaccagtacccccaaagctccctgggactaaaccaccaaccaaagaaaacacatggtgggactcgtggctctagctgcatatgtagcaaaggatggcctagttggtcatcaatgggaggagaggcccttggtcctgtgaaggttctatgccccagtataggggaacgccagggccaggaagtgggagtgggtgggttagtgagcagggtggggaggggatgggggggttttcagagggggaaccgggaaatgggatagcatttaaagtgtaaatgaagaaaatatctaataaactaagcctcaggagtcacactgacaatatcctgttgacttacacaggctagacctattcactatgggaggtgactattcagagactggggctactggcagatgaagaccactggagactgaccaccacaagtaccataatatcagtagttcccaaactcaactgttactagctgctgccatgttcaaagaggtctagagtagtcccacatcttgtgccacatgtctgatttcctctgttccatctcccacagtctcctaggttggttaacaggagatgggcagctcgctttgcttccagacctcaaaagtccctgcaggtacatgcaggtcagtccactcccatcctccccgacctatgagaagaccatgtgaccatgctgctgtagaaatgtgcctcctagccggggagtggtggcacatgcctttaatcccagtacttgggcggcagaggcaggggcaggggcaggggcaggggcaggggcaggggcaggggcaggggcaggggcaggggcagaggcagaggcagaggaggcagaggcagaggcagaggcagaggaggcagagacagaggcagaggaggcagaggcagaggcagaggcagaggcagaggcagaggcagaggcaggcagatttctgagtctgaaaaaaaaaaccaaaaagaaaaaaaaaaaaccaaaccaaaaagaaagaaagaaagaaagaaagaaagaaagaaagaaagaaagaaagaaagaaaggaaagagagaaatgtgcctcctatacatgtggacaggagcctgatatagctgtttcctgagaggctatgccagtacctggctaatacagaagtgggtgctcacagtcatccattggactagagggtccccaatggccctggcattcccctatactggggcatagaactctctgggtggctatggaaacctccactcaaattgggggtgcagtcactagccagttaatccagtcctgagttgtgttaagttctcccaaggaaaattgtaggacattaggtaatagtggactggcaaattctctgtgcactatttgagcagtcaggtgattgggctggacgtgagtgttaccactgagttccagtgtaagcgttcagcaatccaaaacaacagtagttccaataagatggatgcttatttcagtcttatataaacacatagaacggcagagtgataagacctgggctctttctgtcttgttgctttgttccatgtggtttccatttggtggtttgagatagtggcatccacattctaggcagccagctgcataaagcgacacacagggcaaagagcatacatcaactcttcctaaagccaccttctccctgcatttcaataacttgatcacatagacatgcctagctgcaagggaagctgtgaaatgcaagtttctatgtatccagccaaaaactgggagctttttctctctgtgtaaaagataccaacaccagtcagtctttttgttttttcaagacaaggtttctctgtataaccctggctgttctggaactcactccgtagaccaggttggcctcgaactcagaaattcgcctgcctctgcctctggagtgctgggattaaaggcatgcgccaccactgcccagctcaggcagtcttatcgtcatttactctgctgggcattgttatccttgatcatgctcaagggcacatctgagattctttaggagaatctgggctaaagatgagaatagtccccaagatgtccaagagctagtctctggatcatgttctaaaaagggaagacatgagatcaattgcccacaccatacaacttctattttgggtttatctgtacccagtggttccagaaggtcccaggatgctttttctttctgctgctcccaggctccaggactggctaaaactttctcatttcccatacataagagcatggggtgcgggtgtttgttgaatgaatgaatgaatgaatgacgaatgaatgaatgaataatgaatgaatggatgaatgaatggaagggggattccggttgtcagaaagagaagaacctggtggaatcgcccatcactgcagaccctgaatcttgctgcccgcttatccttcaggaaaccaaggagctttttatgtcaggacactgcctccctgcccatcctgccttttgaacttggatccccacttttctccttaagttgttgtcttaaatcgcagctttgaagaaggcatcagcagcagaacccagggaagttcagaagtcagatttcccctacatgggtgtcctagtttgctttttctctgctgtgataaactctcaccaaagcagctctgggagcaaagggtttatctggctcatacatccacacgcccttcagggagtgaagtctgggtaagtaggtactcaaggtaagaaccatgaagcagggccgggcgtggtggcgcacgcctttaatcccagcagagggaggtggatttctgagttcgaggccagcctggtctacaaagtgagttccaggacaaccagagctatacagagaaaccctgtctcaaaaaaaccaaaaaaaaaaaaaaaaaaaaaaaaagaaccatgaagcagaaactgaagcagagacctgtggaggatggaaggctgctaatgggctccactgctcatatgcagtagctttctgatcccaggatcccatcctaggaatgttgctacccatagagggctgggccttcctacatcattacttaggaactaagaaaactttacacacatacaagcccttaggctaatgtagtggagccatttcttcaatctcttccaggtatgtcagattgacaactaagaccagccaatcacaaaaagtttagagttcagctgcctcctcctctagcccagcaagttgagggaggttttcctctgtacttctgtgtttctgagaatggaggctcctaggggcaatcagcggtatgttaccatttctaaccgtgcaaactcagagcctctggataaccctgcaagttcctgacttcaggttggtagatgctcaacgagtactggttggcatcaatcccgaagaaagatgatagaagtggctagctaagcccaactctaacaggtggagaagctgtcactagatgccaggctgttcactaaagcagggccccaactacctcctttgatacctatgaaaagttgaaaagtgggattaacagttatacagatagagaaaggggtggtggtggatctcgggagccagatggcttttcctaagaagcaagggatgggtgggaggtgggtggactttctcaatctaggactgcgttgcccatcccccagttttaaccttcacccagaactagcaccaagcatggacccgcaatttgtagcatttttctctgatcttcacaacgcaatggctttgttttacaagcacaaaacccactgcctgaggcagagcgatttgtcctgaggccccacttacgctaggaaaaaagatcagaggccaaaaagaaccaaagcgggagtcttggagacctgggcttgggtagcatcccactctcgggccttcccattcagcgggccctcgggcccctttaatggggcggcggaaggggcggccgggggatgtggcggcgcccaatgggctgcgtggagcgtcacttcccggcggcgggaggcgagtggcgagtgtcgggcaggctggcgggggcggggcggccgaggaggcgttggcagcgggctcggacccacgcggcgctgcggcccgcctggcctgcaacgctcccaccggctcggcggcacgatgccctttgacttcaggaggtgagtgaggccccgggcccgaggccctctgcagccggcgacgaccaccccccaccccccgttacgtgcaaatgcgaccctggtgcactgtgcacgcctcggcaggccctaggggaccgcggccttcctcggggttcgagccctacccccacccctcgtgcagccctggcaagccctcgcactctgttttccacggcgcggtgtccccagcttgcccctgacatctttcattcccctcccccaacctgggaaccaaatctcctcccaaatcccaaataaaaggagctcaggcatcctcaggctttctccccagtcttccctagtggaccctgtcctggctgacaggtggggccgcgcgcctggctttgcccggtgggatctgagggctgcagccccattcaatctggcagcagttggagaagcttagttcttcagagcctgagaatcctctacctaccagatgtggaggcttgttcccgcaagccatggggacagtgcgggaagaggaggatgctgggatctcgaggttctgcagaaggttctttgcctcctggaacaccattgtatagggccaggccttctggaagcctgcatgggaagggcctccccaccagacattcccttgacataagacgctctgagatgctctgggctgttgggatactttggagcaaaaggattagaagcctggctgtacctctctacccagctgcttagtagattctcaatgttagaagcaaaggcttagggtgcagcccctcaccgctcagctggctgaccccagcaggtgtctgggcatgctcaaaatattggtttcacctcttgcaaattggtactaaaaataaggtcaccacctgaaagacagggattgtaaggcacccctgacccagtctccatcacatggaactcagaagtagggcatctgtgactgaggagatctgtgagcgctccccacagccagagaacgggtattcctccattggtcacagtttcccctcatcctccccctcttactgatgtgtatagaggcagaacagagtgacaaccaatctaaaaacggcccaagattcggatcatgtggtggcatatgggcaacctggggtcagggcccagagaggacattggtttcagacctcttaaccagccaaagtggtttttagctcactctgggcactggtactatctggcaaaccagcttcctgcttgcttgaggtagccccggggtccatacctgggcttagacaaaagcatacagaccatggtagctttgaaccgagagggctttgagccagttttagggacacccattaccacagtgtgcccatgcagaaagaagggcagtgggcacatccaggcccccccctcaaacctcccagggctgaccggaaagggtcccaaccctcctgtccccacacggttctgcaagtcctagggattttgagtttgttaaagaagtaactgttctggttacttcatcttgtcagttctctgacccgcctgcatgccccgcctgcatgctggaagggctgggcagatctgggctccagttggaagtttgggggctgggggcaggtgagatgaaaaaaaaaaaaaaaagaaaggaaaacagctggggccagctttagccttgtcagggcctgcttattactgactagtttaaggcattgatatttaaggagcacaccgctcaactctcagctgctactgccttggggctttctggatgtgtctcaggccctgagtgcccgggtgccacagggttcccactaatgccagttgagaaagtccttgcttgctggggctcactggagaccagtaagaatggattccccaccgttcgatctcctcacgcagggtgagctgtgggtccagcccatgtctttcttctctttcagacgttgacatagcagagctctaggactcactgtgaaggaaggctccgccgttctacagacctttaccacatacagggccactcatcggcttgctgagggttgtacccagtgtttagccacctgccacttggactatcattaggggatgggtggcatatggcacaaccctgtggaattgccagaggagtgttgcatgtgtgggggggagggggaacgtgtcacatgactgggttctaggagtagccactatataagcaaacttgacatccatccctttgtcactgaagagagtgaatgagtcttccttttaaaccctggtgagggtgacccctctggcaaaagcactttgcatggatatagataaagctggagtcggagtttggcctattggcattgaagccttagctctggggcacaaggggaatcttgaaaagccaccactttgtcaaaccttttaatagtggggagcacagggggcgtacagtgattagaacatccccatttcccaccagttcaagaccaaggggaacccagcttcctaacttgggtgtgttttcctgcctaggaaatgggtatgatcgacatcctcacatgagaccaggtggcatgtgggaccagcaagcactgtcctctgcctgccgccattattgtaccctttgaccgaggcacctgctctgtaattagcgaattctgccatcttctcttccctttcatcagtatctgacctcctaagggccaggatttatatccagtttgtatgtggttgcgtctgcaggtggaatggtacttgactagaggtccccccttgggcaaaacacacctctccagtttgtccagtgtgattgcatgtgccagctgctggtggagaattctgcatccctctttcctgtttttggtgcttggaggagaacccaggactcgtgcatgctaagcaaattcccacagagctgcatcccaaggccctctctcctcatccttgaattggccctttctgagttttaggggttaagggcggaggttgagccttaaatgattaccgtgtttgctttgttcccgttgagcggttttactgatactgatcattgaactcacagaactggcttttgttacctaggtccgggggtgttgttcccagttccggttgactggtggcacttgctgcctgttactccagaggctttgacagcctccgtccccagagcctgagccccactttcaggagagaggcaatggctagctctgccacagtggcagtccccgtgttgagaccccatgatctaagagtggtgtgttcctcccctggctagctgtgtgctcacttcaaggagggagggggatgtgtgctgcctgtcgggcaagaaagctgtccttgcagcgcagagcccaggttcagatgctgatctgggggacccagtgcacaatgcaagttcagttctgttgagaaaggatagagtttcagtatgggtgaccccgagtgacagcgcaggtcatttgattgtggtgctggccccatcatgacttggtttggtctcctccactgcttactgtagctttccaaaggtcttctcccctcaggggacttgagtggaccttgcaaaagtctctctctctctctctctctctctctctctctctctctgtctctgtctcttgtgtttccctctttcttgtttgcagtgctgggaatggaacccatgaccttgcacatgatgggcatgtattttaccactgagctaccccacctgggtcccagcatgaccctcttgaagttggcttgaggtttttctgcaccctactttcagtcttcaaatgagtgatgttgatctgagaatccagtctggtttcctcagtgtctgacatgccttccccagtgggccttgctgaaagctgaagtcccttactctctgtggtaggctaagctgaccaaccactgaggctctgacagttcactgtcaattgagggaccaatacaaatgcccccatttctaccttggcattccaggaagagccagagaccgatgggttagtccacgtacttcacggcatgtttataaaaatattactgaaaattcagactggaggcggaatgacctgtaaaacccaggttgagtttattgagcttgtccaggtgctgagccctgttgagtgagctgcactgggggagtctcacaggggtgactcgttcacacatacacacacacacacacacacacacacacacacacagagtgagctgcactgggggagtctcacaggggtgactcgttcacacatacacacacacacacacacacacacacacacagagtgagctgcactgggggagtctcacaggggtgactcgttcacacatacacacacacacacacacacacacacacagagtgagctgcactgggggagtctcacaggggtgactcgtacacacacacacacacagacacacacacacacacacacacacacacacacacacacacactgcaggccctgaagacccttcttagtcatcccaccttagtgagcaggcctgagggcatttgcaggagctgatacaacactgctgttcccttgtagagcagccgctctgccccatgggctagaagcgctctctttcctggtccctagattcagagagaggcaaaacctcctctaagaatgcatctccttcctccttgctaaccctgccccagcgtgctcctcatgaatcttttaaccgtctgcaggcactccatgcttccctttctaccccttttcctctcttcttctctctatcacctgattccataatcttctaaaattaattttttgctaaagtccccatcccaaacgtaaatgtaacttttattcatcagacgtgattgttgtcttggaggcttactgctggaataaacttaccctttctagctctttctgaactcttggctggttgattcagctcagttgttttggcccaaactcctgtctaagctgactgattcaaactggctcctctcagctttggactgaattgctctacttggccttaaactaactctggcagtctgttctaatcttctgggtccttctcgttctctggataatagccgtgttcatgcacttgcctggaacagtccctctctggccatttggattcctgactctggtaaggaaggcaggcattctgcctgaggcttgccttgcacctccagatcagtgaggcagcacctggttgcccatgggcattgcttgaaatcagaacagagctagctgtgggtctgctaaagcttttcagtgagtgatgccaacccagaggtgagaaggattgctctgagttggaagagtcacaagcaggtgggttggagccctcagggagcagggcattggaggagccctggtgggcaaccctggagaaaagagttctggccctacctgaccctcctgtttgatcttaaacagtctggttttctacttctacagtggccaataaagagagccaggctcagatctctctctctctctctctctctctctctctctctctctctctctctgtgtgtgtgtgtgtgtgtgtctgtgtctgctggatattaagtgtagggcatagctggtattctcccactgagttatactgtcacccctaatattttgagataggacctgctaaattgcccatactactgtagcatccatgaagggctgcatggaaggaaccagggcctgggtcagcccagttggtgccagatgtgtgatctaaggagccctgctgtcttgtgcctggcaccgtttctcagaatacagtttgacctgttaaggaagggcaattagcctagtcatctgttgtcagcttgagtgtgtaggtctattaacctaattacattggttatatatgtgggaggagtacaggataggcagccctccggcactcctgtgtgtttattctgaaagttcgtgacccacagggaaagcaggaagaagccccataaaagccacctcatccgcagaggctgctgcacctacttgtcttgtttcacagccatggagatcgacccccagacatttcagatctcaaagttggtcttccaaggaggcccttggtcccaagcgcaccagaaggcacagactccttgtccaggaacaccagctgccctccaggaacctgcctgaagcctagctggacaggaagcaagggctatctgaaatgttcatccaaatagtgggaactctgcccgagatgagaggcctggcagtggccaaacttctaatgcagtgaactcacaggccttatgtgtatgcatgcatttttgtgcttatagttggaacgacacataacccaattttaaagatgcacaggggacctaatatacagctctcaaagaatagtcaggtggttagtggggaattgagtagttctacatcagccctgggaaataaaaactgaaacagttgtagctgccactcacacctggcagctgctgcctgcctgctggtctggagtcccagcagctccttcagcctcccttcttgctcccatttgaggctgagtcttggaagtgatgtttcttgaagtttcttaagcactgagccagtccacacacatcacggacaaccgtgcaggtcccaagagacagacacaggcaataagacttcgttgtctttgccttatttgcgtctgtaataaccacccagtaaaattgatggttgtgtgtatgtgtgtgtacttctaatgatatataagacatgcttgtgaagtcacaaccgccatgtggatacagaacaggtccaggaccctagcaaactcatgctgtcactttatagtcaggtggcgttaaattgagttttgaaatgcaggaagaatacttgagatctgccctcctgagacactcaacatgttagctgtggcagatgtctgcagcaggtctacagaaggtaaccacagtatctgaaactgtctatgggacagctccctctgtccctccctagtctgtggcaaccaccactcacttctctgagcttgcctgtttttaagagtttacggagaggagtcactctatgtttgtcctgtggctggttcacagcatttaacattaagtccctctacaggacctccttttttagtgctgcgtagtactccgatgtgtactcacaatgctgtcttatctcctcatctctcaggggaccttgaagttgttcccacagcttggctggtgtgcttaatcctcagcgaacagagatgtggagacacttcttcatgagattccgactcaaacttgtggagagtaatagatgccaagtaacgaggttgctggttcaggtagtctgtttttaattcccacggtggttatgctgttgttagtcccagcaacctgactccttgccctcaccagcctttaccttttgtctttagatgacgtcatgcagggagatatgaggtgaagctccaggacttgtttgtaaccatgaacttttccattcatgccattttgctcccccattttgttggttagactctaagatttatatatatatatatatatatatatgaataaatgcctaggctaaaagccttggatctttccctgactagctcataccttaaatccctttattctagtctaagttctgccaggtggctgtgaccattgtcctctgtccatggggccgaatcttctcttggcatgactgtccctctcccagaaccccctcctcctactgggtgtcccaccttctaattctgcctcaactcattggccaatcaactttatattgacaattgagtctttcatagagtgcacaagagattatccccacacctgtttgccttgtcccctctgctcagaccttcccatggggccacgtgtacttttgctgtagagatgaaggactccctgtacgtcttggatatagtctccttgtcagatctgtggttggagaatattttcttccatcccctaggttgctttttctttccagtaactgtttcctctgctgattccatattagaataggaagttagagcccagagctgggaagtaactggccaggcacatagctaccaagttgtgtgcaagtctggaatttcagagctcactcataggatgtcctgcttttccagacaccctgagcgtactggttctcatgaatcctggtgaggccttgtctgcgtcacattcacaccagaagctgttagtgctaggaattagctaaaacgtccccagagagcttttggagtcctggtgttgcttggcctgctctgatgttttcctgggtcccaaagtccattcatggtatacagtgtctccagacctcccaggaatgtgacacagagtctgggccaggatgctcttctccattgcaaatgccccagaggatgcctggctgctctaagctgccccaagcccttcccatgtggcagatctctcgtgatggctcttttctcaccattcagtagctggggtaccctggaccactgcaggccttagtttttctcatttgtagattagagtgctctttcattgcagggatctggagaggccctggcccagcagctatttaacccctgtattctcactgggactggtagaccacagtggctgggcacatggtgtgtgaccatgggaagcagggccctggctctgcaatgccagtgatgcacacctgagagtccctgggacaggttggatctgggctaccctttgcagcaaccataggtgacatcagtatgcttgcctgagaggaagtatcgcactgagataatccaagagctgcctgtggctagctagaaagctgtgtctgtgtgcaaatgtggcttcagtgtgtctgtgtagccctcatcttttaagagatgacaaaaagcttaaaatgatgtacagatgatcggctacagactccagttttgtttctgttaaccttcattgtgagcctaacaagtctcttgtgggacactggccgtgtacaatcctatgtcccactttctggccagtgtgatcagcatgtgttcactggatggacaaggactttgagcagagcccctgcgactcttggcccgtggccagaggggtatgtcagggttctgttcccacagggtggtctagatgaggggtgatgatgtctcttgagctcccctcccagcagcactggaggttgtagccaaggctagccagctctctcctgaggggtgtgcccttcctccactccgagtaccatcagcgcccagccatcaggctccctggggctgtgctgcactggcacgtaatgtgcccactgggcagcttatatgtgggctaggccagaggcttgccgtgggtctcctcggtgcagaggcagggaggaacttggtccctgctggcttgagaaaggactgtggctaagatagcacaggggcaggtgacgcagccaagactaacgtgcctgtgtgacgttagagctggctttctcagcagcctcatattctggaagacgtgttatcactttattttcttgggggggggatcccacagaaaccccgaggttggatgttatctactcagttgtatttatggtttgttgctatggaagctgggggtggaggcagtggtagtccaatggtgaagcttgagtgactatttcctgtcactgtggacatctttgggtaggaagttaccattgagcactgctaaggagccgcagggcaggagacaggacttcccgggtgggcttgcagagtgccttccagaggccgaagtagccaggtgtggggagctgttcactggtcactaggacctactgtgtgccaggtgttctgggatctgaggcgcagacaaacccctgtccctgactccttggacttgattttagttctgacattttatttcttggttttttttgttttgttttttttgtttttttgtttttgttttgtttttttgtttttgtttttgtttttaaaaactcagtgaactttcaattttgaactaactttaggtttccaagaagttgtagataaggcagagctgaccgctgttcccactgtgcacgctgcccattgccacatgggtcatcccagctcaggaagtgacaatggcatagggtcagtgtcccatgcaggcctccacgtgccttcatgctgcaactccagtccccactggccagggccattgcacaatccttgactttcatgaccttggctgtcttaagagctctccaggggccatgcaacatatttcccccctgaggcctgctgacctttcttaccagtagactgggttgtggggctggggaagcaaccagagtgagcaggcctttctgggccaccctctcaggacaccagaaccgcatggcatgcattctgatctctacctgtcctgtctttcttacctagctgctaataaacattctgttgggaagtgacaccccagggccaggccaccttgggtgagtcacatggcagtggccccacaacagtgggccgctggattactttgtagctgtgcagctatgagggcacaggtgagggggttgggaggcacaggctcagtcaggatctaacttccattcatcgcaggtctgcaggctgggacgtactaccagggctgagagtggggaagagccagtaacaaagggtataggaactaagtcctgagaaacctgggacccaggagtggtgactctgggcatgtgatcttagcccttggaaggctgagtcaggaggagtactcctggtctgaggtcagcatggcctatagagtaaggccctggcttagaacaaaaccatctgtaaccgtgtcttatttagcactggaaagtgttctaaggagcatgagacggcagctcttacagaaaacatcacctcgaggcatcacccagcttccttcacgtgactctctggaagcaaattatctctgtcatatcttaattcatagccacggcaaagaacagctatgaccttgtatagcaaagccctgtacacggtacgccgtgtgtgtcttcatgtggtctttctcaggggtgctcaccacattgtctgctttctgttttctgactcatccttctcacccagccctgaccgtggtaaccgctctcctttgagcgtagtgggttctccttcccttcacatctgcagtttgttttacttcacctagtttgtctttcatctaggtcctttctggcacaaggcgggatctctctctctctctctctttctctctctctctctctcttgaaggctgaataatattccactgtgtctgggagctgcattttctgtgtccctccatcagtggtggctgttccacattgtggctttagtgactggtgctgtaatcaagggtgcaccttttgggatttcatttcctttgggtatgcagagaagagagattactgggttgttctacttttgattccttgtttatcataatggctatgctagtctacacccctgacccagctgtgtgcaagcattctcctaactctcccccacccacacttgttgcgttttggatccagtggccgccatgctaatggctgtgtggtggtatcacagaccattttagtttgcatctccttgacagttagttgatgtcaaccaccttttcggtgtgttcttggccgtcttgctcatttttgaaaaagtgtctcaaatgcccacccatctgcctgcttgtctgctcattaaatcttgggtattaaatcctttaatcagatacacagcttgcaaatgtttctccctgattatcagccgcctttttcatttgtctcctttgctgtgtagatacagagttcgctgtagtcttagctatgtgtttattatctgtgacacattattactcatttgttactcttgtagcctaatctggctgctcttcaataagccatattctgccaggtgctgtggtgcacaccttcaattctggcacccaagtgtcagaggcaggaggacttttatgaatttgaggccagcctggtctacagagtgagttccaggacagccagggctacacagagaaaccgtgtctcaagcctccctcatcccctgcccccccacgtcaccccctaaaagtcatattccaaactagtgatttcttccaggaaatcttgtggtttctggctctacatttaggtcttacggtttgtttttctttaatccacatcaggatgattttcacatgtggaataggacaggcatacgatggtctcacccttttacatgtaaaggggcaggcttccgggcaccgtttactgaagggattatcttcaacccttgtgttctcttgatgcccttgccaggatgagccgaccatgtgtgatctgccccccagggcctgtgcgttggtttttatgttggaatcattctgagctcattactatggctttgtagtataattttatatcatggagtaggaagtctccatccctgctctagctgtttggagtcttttgtggctgcaaacaagtcttagactttcttctgatttctgtgcagtctcggggttagaggtgccttggctgcctttttcttcctttctctttcttttcttgcctgacacgtctgctgatcctgagtggaggtgtggagagcagcacccagcctgctgccagattccatcagctgtggagttttcatagatgactctcatggcaaagaccttgccctccctcaagggtagctgctgtccccaagcttgttatgcatcaggatcgtgtgggtcccctctgcgtgtgatgcttctcatcggctgccagggcagaccagcctcgcagaccagggctggagtgcgcacctcgtgacctcttgtgtgcgtgccgggcaggtttctgtcccctgcgttcaccacgcacactggcttgtcactttcctgtggttcctctggccaggcattagggtgacatcagcctcataaaagggtctcttaggaataactcctcccagccttcttcctttttggaagagctgatatcctggcatcggttgactctttttgcagaggccagagacttcagctgtgaagctgtcttgtctgtgggctttttcttcattgggaggtttatttatttgtttaatccaatttcagtatcttttattcctggcttcttactggtccttactgttgacagggtaacaggtttttctaagcttatccctgaggactaggaggtagtgttgggctccaaggacagcatctcactacctctgctgccagcttcaggtacctcctcctccaggaagccttcctccccattcccccccaacactgtccatccctgactacttggccctcggacagcctcagctctgtgcatgtgtctcataggccctgtcacttccttactagtgggcttccaaggccgtggtagtggcaggcttgtgctgtccttagcaggacctggctgagagccttgcacacaatcaggtggtagcccccaggtgacatgctcagcagaggcacggggatgttacagggctagccatctgcttcaggtcacagtgaatctgtacctctctcagcctcagtgacctcgttgaaaggtataggcacaatgataatcataccaggactgccgtgagtacagagtgagcactctgatgtcttaacatggggcctggcccccttgggtgctcataacctgtctgttgtatgggaagcaccagcacaccaggctgctgggggggatgggtgaagggcagacgcccagaggtgctgcctttgctgtctgtcagcttcttccagaaaggacccaagaagcttggcgtcttcgtgccacacacgcttattttctccccgtaaagtccaagcagagtcgacgctctgcctttgtggataccgggagaccaggttcgttcactcaaagtatataacctgcaaggtaggttagggtaccactgtctcttgaaggtaaggaagtgaggtctggccatgtgccctagaggagaaaagatgctgtcatctctgtcaccatgactccagtcagcgctatctgcctctcccttctgccatcttcattattttgagccaactcctcaacagatgcgttacttaaaatgtttcttttctcttccttcattgtcccccacccacctacccccctccctgctgagacagggtttctctgaagccccaccttgtctttggagcaatcatgtttcttttaagtcagtgtttgaaacactctgattgatgagaggtgactttacacatcatcagagcggagaagcagagtcccctgcatagatgcagtcccagctgcagcgggggccgggggccgggggccaccggatcggctctgtttaagaggacccagtgatcctccgaggccccagtgcacacctaagcgtgctggtagagtaccatcccccacatgccctgcttttctattcatacacatctctggtagcttcattcataaattagagccaagaaccgcaactaagaataaaataatggtaattgtgcaccgcaccggaaggacgttactgagtaaaacacggttccttgagcatagaccctgtgaatcttccatatggtcggtctgataactcaggtacagctggtgtgcttggctcacagggcaggagtctaggctcctcccatgttctcaactcccttcctctggggtctgtctatccactccaagttagaacatcaccagccctgttcattgaaagcccactcattgctggccctgccagaagcatggattcccactgtgggtaagaagtgagtggggtccagggtgtgcttgcccaccttccctctctctctccttcctccctctttcattggggcttctgagaagctaggactgcttcccccatcagctgttctagctgccaggaggatgggtagagccacaatatgagtgggtgttttccacgcaagtcctgaaaaaggaaggagcaggtggtgataagagagagctaacagtgacgtgttaacgaggcctctttctcagaaggcagcctctgggctcctttgggctctctggctccccttctctcctccccagttgctgccaggctctgcaggccactgcgctgttacttggtacaaaacaatggtccacttttctgttcagctgacccctgcctgccctagtggggaacacacctgagaacacaccaagtccacccacttagggggcctggcgctggacctgggctctgcacctctaaccctgtgggagggagggaagagacactgacaacctccgtcacacagcactgaaccctgcagcccccactgtgagaggacacctccctcctcagggatggactgggtactttgtggcttcatctctctgtttagatcatgttcctagctttctcctaagggtgtaagcacacaggagtggttggtcatggggccctgaggaataggagagtcagtgactgggaccccacactctatcaccttcagtctacaggcttcctttgaaatgtccgatgagtccccagagtctggatgaggaaggttaggagagagaggacacctcactttccacatgcacccctgcttgagagctggacttccttgtaacaggaggaaccagaggctcggagaggtcaagcttggcccagagccacacagctgggaaagtcatagagccaagctgtagagcaacgctctctgaagctcagcttttggctagatcacttgacctcgaaatccatgttgctgggttgggaactcagtcgctatattagtaatctggcattctcctcagttgcctgggggccgcgctgcccctggagggtctgcttcagctgacccaggaatccacacctttaccagctgactgcaaaagtccttggccaagcagtcgggggccctgaactgggatcaccttcctgtactcagcctcaaaaacagccagtgggacttgaaagtttccaaaggcctttgaagacaattcggagtctccacagataaggactttgaggccccaggggagggcgagtggcactttggtgccacacagctggaaagagtggtcacaggaacacagattttcctcagctgatgatgtaggaatcctgtagccatgttgctgagggctcagtgccagcttcctgagccgtggatcatagcgtgaactttatgcaggctacctttgcacagctgtgatctagtgaagtgtcaaaagtgagctgtcacattcagcaggtgacgtgtgttaaaaagtactcggaagccgggcgttggtggtgcacgcctttaatcccagcactcaggaggcggaggcaggcggatttctgagtttgaggacacagagagagtctgtctcaaaaaaacaaaacaaaacaaaaaaccaaaccaaaacaacaacaacaacaaaagtacttggagatagactgggtgccgtgtgctaaggatctgctattggatgctaacaacagcctggtctcaggtaaggaggctcaggtaacttgtcccaggtgacaaagccagcaagtggtagagctgagagtctcccaggctgcctgccagggctcatggtaagcggaggtgcccacttgcagatgcttgtgacagggcgtaggttttgactgctcagtttcaggaagatggaagggagcagtgtggtgacaacagtgtcatcatccagtgcaaatggaggacctgtcactgtgcttgggtctcactctgagccggcgtgggctgaaggtgcttcttagccatttccttgaccaagaacgccgggtggagagttgctgtgcacagctcctgcagtcgagaatccgcaagtacagaagcctgagagggggtgcaacaggcagctcttggtttccaaggaagggagctgagctgttgaaaaaacatggagtccttgtccagattcaccagcaagccggtggcagcaaccggctctggctttcctcacctacaaaactgggtcaaactggaggccaggtggtttgtcacatatgagttaaccccgagtcagagagggtgtaagaaagtttgccgcctgggccaggttcctcactgtacatgtcagtcacctctgcctgctccctcatgcccctgagcatgacaagtcagccatccaggattctgtgctgggacagctggggtggggtaaggtagggggtggggaagaacccagggcttctcgtgggcctgggtcccatctctgcactccacttgcagtgtttccatgggctcctcactacactctgagctggttcactgggctgcaggaagggctgcttgcagagagcagaagctggcggagccccgggttcctgcggctcctaagccaaagttaggacttctcttttcatgaaacctccagatagacttgatctagcaggatgcaaaccaggaccctcgagcttatatcaataaaggaaattggcttaaatgcaagcatatgggaatattttagctttgatttctcacacttgtttgaaagtgagccttgctgaccactgactacatggcagtcaatagccatggctgaggtgctgctggatcctcccccaaacacacacacacacacacacacacacacacacgcacgcacacacacacacgcacgcacacacacacacacacacgcacgcacgcacgcacgcacgcacgcacgcactagcacgagcggagtgcgcacacacgcccttacttcctgatgggctggtttatggacatgacagaatctaggggaaacaaactcaggcaaagctctagcactctgaaagtggggaggtgtagcggggtctgtggtcaattcagggaccttagttgctgcaagggtctgtctggaatgtcagaactatcattggatcaaactgaatctacagtggtcttcaggagcctgggtgtctaagacagactctggggtaaaaatgtttttgctccatgactcaaagcaaggtatataaagttcctgtgccccccttttctcatttgccaaacaagcaccgtgggtcactgatgtgagatgcatagtgccgagtgcccacagctactgctgtgcttcagtgctaagagtgcaatccaggtccccgtgcatgctggcgctcttccactgagccataccccagctggagaccaaaagggtgctcctgaggttgctggtgagagtatccgagactccaggtggttttcctggtagctgaggaagggtggccgaaacctctgattatcatcaccatttgatggctggggacgtgaggatggggtgtggggttgtgttttatgtctttaccttgagtgcctcccttaaaagtgcaacagtggccaagatacagaacaatggagtgaggggggatggcttctgattttctagatcataggtgtggtctgctctggtgtccttaggcagagattagcctgcagggcctggattctgtcagcagttattaaatcaaagtggtgacagagtgtctagcacgagccacctccttagaaggggcagcagggactgggctggggtggaggtgtgtgtctctctatggaaggagtcggtggctatctttggggaagatagtatggactagtcactaagttctcagtgccccagtatcagggaacactctgtcttgatcaccattaggtccttggggtcaagggacatgccaggggcactgaagacacagaagaatgtggcagggctatggagtgagtgtgcaagccctgtcctatcctggctgcgtagggaccttccttctcaggacactggagtttccatgagataagacttgggagctcctcagccctgcatccaaccatgatggacagacagacagcatagaagtgtcaggcattatggttttacacagttatttctgtctctagcccttcatacaggcttctgtatgatactggagtcttatggtaaagggttcagctatcctttcagaattttcccactaccttgtgataatggcttagaaaagagaggtannnnnnnnnnnnnnnnnnnngaaagtggggaggtgtagcggggtctgtggtcattcagggaccttagttgctgcaagggtctgtctggaatgtcagaactatcattggatcaaactgaatctacagtggtcttcaggagcctgggtgtctaagacagactctggggtaaaaatgtttttgctccatgactcaaagcaaggtatataaagttcctgtgccccccttttctcatttgccaaacaagcaccgtgggtcactgatgtgagatgcatagtgccgagtgcccacagctactgctgtgcttcagtgctaagagtgcaatccaggtccccgtgcatgctggcgctcttccactgagccataccccagctggagaccaaaagggtgctcccgaggttgctggtgagagtatccgagactccaggtggttttcctggtagctgaggaagggtggctgaaacctctgattatcatcaccatttgatggctggggacgtgaggatggggtgtgggttgtgttttatgtctttaccttgagtgcctcccttaaaagtgcaacagtggggctggtgagatggctcagtgggtaagagcacccgactgctcttccgaaggtcaggagttcaaatcccagcaaccacatggtggctcacaaccatccgtaacgagatctgactccctcttctggagtgtctgaggacagctacagtgtacttacaataaataaataaatctttaaaaaaaaaaaaaaaaaagtgcaacagtggccaagatacagaacaatggagtgagggggatggcttctgattttctagatcataggtgtggtctgctctggtgtccttaggcagagattagcctgcagggcctggattctgtcagcagttattaaatcaaagtggtgacagagtgtctagcacgagccacctccttagaaggggcagcagggactgggctggggtggaggtgtgtgtatgtgtatggaaggagtcggtggctatctttggggaagatagtatggactagtcactaagttctcagtgccccagtatcagggaacacactgtcttgatcaccattaggtccttggggtcaagggacatgccaggggcactgaagacacagaagaatgtggcagagctctggagtgagtgtgcaagccctgtcctatcctggctgcgtagggaccttccttctcaggacactggagtttccatgagataagacttgggagctcctcagccctgcatccaaccatgatggacagacagacagcatagaagtgtcaggcattatggttttacacagttatttctgtctctagcccttcatacagacttctgtatgatactggagtcttatggtaaagggttcagctatcctttcagaattttcccactaccttgtgataatggcttagaaaagagaggtacatggttccatctgaggtggggaccttatggggagccatcaaatgtcctacaagtacttatgtgcatgtatgtgcacaacataggagtatgtacatatgtgaggctgtgtacttgtacccatctgtgcctcagtggtctcacagctaaggcatcccagtgtggaacatgggacctgggcttcatgtcccctttcaccaggtgcctaggtgctattatttcagataattgcccagaaaccatgcaatatgcagtgtgccacaggaccagctatcatggtaacttgattggcctcagggtctcctcttgcttcagggagaagcaagcagagaagtcctggcctcagccccctgctgcatgggctggcttttgatgtccccctgtactacctgggtccagggaccagagacgggccagaggcatctgcctagacgtgtctcatatagtgagttcagcctggactaaagagtaagactcttaatctcaaaagagccagaaccaagccgggcagtggtggcgcacgcctttaatcccagcactcgggaggcagaggcaggcggatttctgagttcaaggccagcctggtatacagagtgagttccaggacagccagggctacacagagaaaccctgtctcaaaaaacaaaaaacaaacaaacaaacaaaaagagccagaaccagctggacctggtggggaaggcccatagtcagcagcattggggaaggtcaggagttcaaggtcatcctaggttgtatagcaggttccaggacagcctggtgtctcagcaacaatagcaactcctattcccattaaatagcaccactgtgggttccaggcccaacatggaggtgtggcatggtgcagcggcaagcatgaactctggatctcccaggccctggacgccctgcagtctgcctggctggggcttagtccttcacttctctgtcctttaacttcctggcttggaaatggagggaggcctggatcctgcctctcagggacaccgaaaagtccaagccaggctcttgtgtgcctggtgtgttggaactattcagccattgattgttgctaagggaccacatgggacttacctgaaaagcaatttaagaaacagaaaccaaagcccaggagtgtaacttcataatggtttcccgcctcctttaaatgactgttctaggtgggatctgcacatgtgctgctggagtcagacttgctcagtctcccttcccgccaaagaaaagttaacttctgagaggtcacttgacccgtaggtactcggccactggggctcctaaaatgaagcctttaaagagctgcctggggtattggtgttggacaaggccactatggggctgactgcccttagtggggcaggcacagcgtgagtgttacaggtcactgcatcagcccccacctcccctaaagtgctatttcctagattcctacggcatgagtgggaacagaagacagtaagggaaggacaggaggacatcaccttgcctcttcattcatgctctccatcccgttccccaggcttctgcacatgcttggctgggccaaaactacaatgcaaaccaaatctactaagccaactcaaatctcagccaaaagtcccaaacgtcactggtctgtttatcactcacacattgacagctgcatgccactgatcaggcagaggatgggtgtccacccgacctttgtggacatggtgcccaccctgctgaggcttgctttccacaggagtccatgaccaaaagttttctagcaagaatgcccagagctttaactttgttcaggattctagaaggttcttccatggtctttattctgaggacttaatgataagcagggctggtttggtgctggaacagaaagttgcaggctgctctggaggaaaaggccgttatgagtgggtcttcgtggtgggtaagcagttccctgaggcctgggaaggagcatgccctccgggcttcatatagccaggaccagaggtctgcaggccagggattctcagggtggatgcctgcacaggctcagctctaacagcaacccatcaggctggcagcagctggccctgccagcagctggtctgactgccaagatctctctttgattcacattttccacattgaaagatgttttgaaaaccttgaccttcaattcatcacatgtcccttattaaattgtaagtcacatccagccagttaatgaaaagacaatgggcgggtgacgcagtacaaggcatcttggcaggagctcaccaaagcgctctagccacagaagacctgacctagtgatacccctgttccagggcagacagcgtgtcacaactatgaagggctgggcttgagagagtggcaaggctgcagtaaggctggagaagcggggacatgctgaacattcagcagggcccaggcaggtagacgggaacccaacttaaaagaggcagagcccaccgggggaggtggggaggagtcacacgtttgactggaagagaagcaagtggtagatgtgtgagggggtcagtgtggcaggggcttcttagacgcgggcatgtagacaaatgtgagttggagggaagagatggcattgtgacattgtagtgtctgtccccagtgagtactgtgaggtgggagggcagtgagagatggaatagacagctgaggtggaccttcacacgctggtcacttggtgggagccacagaaggttctagaacagatgtcattctgaggaaggtaggagcagctgtgtggagaaacacgtaggtgcagaagaaagtagctgaaggcctggtgacatgggtaggcctagtttcaaagatggcagagggtgtgctctcccttctaggctgactgtccgtcaccttgcctcattcatggaggcggggcagagaactaagactgagttctagcttgcctccttggcctcactccactacctccacttaccaacggaagcagcggaagcagcgttctgcctccctcaggggtgtggcaagagtgaatgaaccactgcacatagtgttaggagagtactggatgtgcagacagctctaggtgagtgtcaccaagggccagagagcctacatggggaccccccagctggggaacttaaaagtattggagtctcccgtgggccagtagactttagggccatgttgacatatgtccatgtccattcacactctctgtgttgactcttgcactggtgagcaagggagcctgtggggcttcagtttgctcattgtgaaaggggatggaggccagtgcctggttcacggcactgttgcagagatgaagtggcctgcttgatgctggagaaggacttagcgatgggcatggctggggtcagtcctcattcacatccaggttgttgccacttccatagtagaagcatcatttcctgtccagtgctttcaggaagatgcctctcctctcttcctgtcacttccctgtagagactctggaccggagactcctctcctcccccagccccaatgagtcttgaagacttggccagacttgtgtgtagtagggaatggtcccagcctgggctccaccccttgctggccgtgggaagttgtgtcggtctgtcatcactgtggcactgccttctcatctgtaacaatgggctgataatccacacattgtgtgagggcaaagctgtgtggcacacatgaactactgcgtgtgccatctccggggccagaagcctcttgtagcatcctcttaggcagaagaggatcctggttcacagaagagtcgcaggttcaaggacagtatcccaggatcttgagcacagagtgggctggaggcatctcagctaagtattccagggtcgtggtatgtgacagtgtcaacccagcccagacgcaggaacagctgtccaccctggccagccagtgtgcacactggtcaaagtttgttatcttagcctttttaacaccctgcgaatatgggagcagcaatccctaccgtccaagggtcgaagctgttgcaggctaggcatgtggtgagaaagccctgacagggcatttgtcagtagcctgggggcatacccaggaagtctgtttgtggtcctcttctccatacctttccttatagcttcttaggctgcagggctgggaggcagtgtgtggcctacatagaagactctgcaccacaccagagaattagcatggcggaccctaagttcttctctctgccctgcatcccctctatacccctgctagggtcacagcggggccgatccctgtaaataccagtccgcttacatgtgcatttttcctctgtgatcttcctgttttgatgagacactgcctttggccgcacgggttccctaggggactgcggtcctgaggcccagccctagccagtcattcaggaattctgcttcctggcgccccacaccctgcacattccaccagggctagcgcctcctgctctgcgtgaatggggtctgccttccccattcccacggttcccatggccacttccttatcaccctctccagctgactgaaaaaggccacattccagggcaaaattagactcaccctccctttctgttttcctccagcgggcaggagagtttgctagagtagactggcgctggagcccacgggtacagggaacagacgtgctgcttggcgtgtcccctgaatctatcacttcgtttcttggatcatttgaggaatgcactgggcttctgctgtatgccaagaaaagccccagggactgggcttacaaacagtggggttgtacagtgtagcatgggtacgggccgacagctgctgggcttgggggttgagctgttttcatttgctccatattctagattcagctgatgcctccatgttgcttctgaggcgtcatttgatggcgtttcaaggagtctgcttgttcgtgccgtgctggggatggaacccagagcctttgcatgtgtgctctacggctgagctgcatctccagagggcagaatggggcttactttaagagccccccttctttctagccaaggcagcacagagccgcacctgagcgccgatgctatgttcttcaaatgccccatgcttagaaccacaggccaggtaaacctcggggcagaacttacccaatctgttagagccacaagaggtgacacccggcagcatctgacaaacccaggctgggaccttctaaaaactaccagtaaaaccaggggaggggacagactgcagcagtctgaagggtgcccttcaggggcctcctccactcaggaaatcccatgattcctggcttcactgtggagaagaatttcatgatgattcaacatgaagcagaattggagttcacgaggggggttttaatgttagtttttggcccaagtactaaggggaaatgaggtgtttgggaagagagtaagacaccagagagcctgggtgtgggcttctctgagggccacacgcctttgtctttacaatggacaggtacaggattatggtggatttaaaagataatatcttcaaagggtttgttatctgctaagaacccgagtgagatctctgggtagtcctgaagggcacctgacagggtcgcacttgagacggtgggtcacaggcagttggagatccccactgtcagcaatgttaatagtcctgcttaggagagtcacagatgatgtccagttcattaccattttaacaatatctctatatgggtaaattataaagtatctatctcatttacagtcatcttttacttattgtaggtctatcatccatccatcgatctatctatctatctatctatctatctatctatctatctacctatctatctactgtcaaccatctgtctagtctggcttctcagccacttagaggctccatggagacttcagagtcaggggccctttttcatttctcacatctctatgatttccttgtctttcctactgcagaaagttgaggaccagtcacaaacctggggggggggctccaacaactgaatgcagtgtggtacctgagcccagcagaaagacaagagagccaaaccctgagaaagttggcggcctagttgatgggatcatgtcaagtttcttagttttgagaatttcagttacatgagatgttagcatctcatccaggaagctggtgggaacctgcagtcatgtttatcctcggagatagaaaagtcagccaggcgtggtggcgcacgcnnnnnnnnnnnnnnnnnnnnctacggctgagctgcatctccagagggcagaatgggggttactttaagagccccccttctttctagccgaggcagcacagagccgcacctgagcgccgatgctatgttcttcaaatgccccatgcttagaaccacaggccaggtaaacctcggggcagaacttacccaatctgttagagccacaagaggtgacacctggcagcatctgacaaacccaggctgggaccttctaaaaactaccagtgaaaccaggggaggggacagactgcagcagtctgaagggtgcccttcagaggcctcctccactcaggaaatcccttgattcctggcttcactgcggagaagaatttcatgatgattcaacatgaagagaattggagttcacgaggggttttttttttttttttttttttttttttttaaagatttattttattattaatatatgtaagtacactgtagctgtcttcagacactccagaagagggagtcagatcttgttgcggatggttgtgagccaccatgtggttgctgggatttgaactctggaccttcggaagagcagtcgggtgctcttacccactgagccatctcaccagcccacgaggggggttttaatgttagtttttggcccaagtactaaggggaaatgaggtgtttgggaagagagtaagacaccagagagcctgggtgtgggcttctctgagggccacacgcctttgtctttacaatggacaggtacaggattatggtggatttaaaagataatatcttcaaagggtttgttatctgctaagaacccgagtgagatctctgggtagtcctgaagggcacctgacagggtcgcacttgagacggtgggtcacaggcagttggagatccccactgtcagcaatgttaatagtcctgcttaggagagtcacagatgatgtccagttcattaccattttaacaatatctctatatgggtaaattataaagtatctatctcatttacagtcatcttttacttattgtaggtctatcatccatacatccatccatccatccatccatccatccatctatctacctatctatctatctatctatctatctatctatctatctatctactgtcaaccatctgtctagtctggcttctcagccacttagaggctccatggagacttcagagtcaggggccctttttcatttctcacatctctatgatttccttgtctttcctactgcagaaagttgaggaccagtcacagacctggggggggggggctccaacaactgaatgcagtgtggtacctgagcccagcagaaagacaagagagccaaaccctgagaaagttggtggcctagttgatgggatcatgtcaagtttcttagttttgagaatttcagttacatgagatgttagcatctcatccaggaagctggtgggaacctgcagtcatgtttatcctctggagatagaaatagtcagccaggcgtggtggtgcacgcctttaatcccagcactcaggaggcagaggcaggcggatttctgaatttgaggccagcctcatctacaacatgagttccaggacagccagggctacacagagaaaccctgtctcgaaaaaccaaaaccaaaccaaaccaaaacaaaacaaaaagtctaaagtgcaaagtttatgctgaatttctttccatccataaaaagaagaaaagagaagagcaagaggagaaaatgtgaggggcctagtggcttgtcatcccagctattttggagctgaggcaagatgatcacaagttcaagacctgtctggtgcacttagggagagactatctctggaggagggggaggggcagcaggaggaggaggagggggagaggaagaggaggaggaagaggaggaagaagaggaggaagaggaggagaaaaggaaaagaaaaagaaaaagaaaaaagagggctggcagtctgtctccgtggtagagcttgttcgcaatgggccctctgaacctacaggctgtacattcacagattcagataaccatgagaaatactcagaaaatcatgtctgtctttactgtgtatagatttccctgtctggttcttgttcctgaacagtgctgtttggtatactcaacaacagtgtgttcttgggtaagtcactgagaagtgatttcaagtatatggaaggatgtataagttctctacctaccatatacattctatacaacacatttgcgtgtccctggagtttctgaggaaggaagtcctgaagctagtcctccaggatatctgggacaactgtacatgtttggagaaaggcttagtggaggatggcgttgggaaggtagacactttccaagtgtaaaattatctctgtgacaattctccccagcaggttagctggccttgttatctgagctagagtcagagcctggccccccggcagcaactgacaaccaagcttgaccaccattctcattggtctccgtggaggtcagtgtggccacattggaaaaaggaaccaataaggagacccagcagcctctgttgagggctcctgatgggaggtttaggtttaatcagaaggccagagtccccatcaaagtgtgccccactcttcttcctctgggctgcaggctctcctgctaggtggacaagttgggactctggaatgtctctctggctggcaccaggctccatgcagccttttcttctccagcatgaggttcctggggaagattccaattccttgagctatatggactcaatattccgatagccaaagagagggacacatgtgtctctttggaatgtattcactcttgccaggaatagcgtttcctaatgggggtctgggccgcccctcccgagagggggagtgtgccccttgctggtgtcactggctcccagctgggaaagggggcttgtcctatgatcctttccagtgtggcccacacagcagccactcttggcaccctcacagtgtttgctgcgtctgtcacacatccaccaccctatgcacacagcatattttacttgagtagtcttcgtttttttagaagctcaaatggatggattttcaaaggcaaacattgatgtcatccccacaagtggaaaacagtcctcaccagcgaatccccggcatccttaagtgagcggggagaaggcttgagcggggagaaggcttgagcggggattattgaggttgtgggttggaggtagctctgaggtagagtgcttgcctggtgtgtgtgaagtcttggattctaccccaagcactgttatattagattgttttcgaattattttttgttattttacgaggaatatgggcttatattttaaagttgcatcttcgggagctagggaaatggccttgtgggtaagagcatttgctacatggtgtgagggtctgagttcaaatacttggcactcacaggtaacttcagaactgggttgctagggctcagagactggaggatcattgaagctcgctggccactagcttgtctccaggtttagtgtgagaccctgtctcaggggagtaagatgaagagtaacagaacaagatacccagggtcttcctctgacctctgcaagcacctgtacacacctgtacacaccacatgtacatgatacacatctccaatacagaagtggactgctgggccaggtagcttgcatgagacgctgctccccctcccagcgactctccaccaaagtgagatgatcagatgttcaaaggtctgctgatgccaggtgagattttcttttaagattactgagacacctgaaagagaaatgggaagtatttgctgtcttttctgggtgtccacatgaccttaggcacaagcactggccagatccgccattggcacaacagacttcgatatcaggctggggacgccggtgctcatgtggcatggcctgcctcttccaggaactcgatgctggtagttcttagaggtccagcctgaagctacttccttctcctccacaatttcatagcatttcttaaaaagccaaaagttagatctgtgttcttctaagaagtatgggggttattttccaatgtggtattgttcttgcttaattctgagaactggattttggcatattgagtcaatgctgtctgagtgacagatgtgtgttagcacgtgtgtaatcctggcgtttgggaggcagagacaggctaatcacaagtgtaaagctagctggggctacataatgagactatctcaaaacaaacaaatcaaaacaaaacaaaacaccaaaccaaacagtaagccaaacatttaaacctcaatgtggcagggggtttttcccctctctcctgattataattcactaatttgatctctgacctcactaacttgatttctgatcccactaagtccttagaacatgtgtttgggaaagcctcctttcagagggttaaagttagcaccacattaacatggcccattaaaaataactacctgctgtgtgctgtgcacagtcctgtactctgcctcacttaatcccagacacactgtgtgtcaggccatcaggtctcagagaggaacatcattttgcccagcttacaaagcaactggtcagattctagaacctgggtcaagctgactcctgcccatgtcctttggcctcgggggacttcctccacacacctgctgtggctccttattcaggctcttcctataggcggtgtggtcagcatgtgtgaggggaagggtctaacaacaagatagtggagaaagaaaatctctaacataaccctaggccaggcaaaggagtcccagggctggctgatgattataaaagagagaattgtttccgaactttctcgctgtgttgttgtgttctatcctgtgtgtcacatgtgtgaagttacagtttgaatcccttttaccttcctgatctgtggccataacacaagtggctagctcaggaatccattctttgttgtagtcatagtgatattctttgtggtgttctaagttttaaatatatttgtgtgtgtgtgtgtatgtttccgatatatatcatatatatatttccaatacacacacacacacacacacacatatatgtatgtatgtgtgtgtatttgtgtatatatattggaaacataaaaccatgcagagagccgggcatagtggcacatacctttaattgggaggtaggggcaggtagatctctgaggccagcttggtatacagagtgagttccagtgagttctcagtgttacacagagaaatcttgtcttgaaaaccataagtaaataaattagataaataataaaataaaaaataagaataagaacacccagaaaataacatacactcatcttttctcttaaaagcagacctctcccgacatttgtctgtgcatttgtctgtcgatttctaccagaggccagcagagccagttcaggacccacgaccaacagggtgggttggctccttacttaggagtctttaacagattgttgagtgaatgcatttgcacacgccatgcacatggacaggcttggttatttgctctgtttcatccagttaacttttgtcaatgtgctaagacattcttggatctagtgcctcactcagctctgggctatcgaggggcaaagctgagaaggaaagcctgtccaggaagcagcaagactcgggcagaaggcagagagacccagaggcagggagggaggggggcaggcaggagtgacctgtagcctcaagaggatcctggattaccagggctccttggtttctgtctggtcctgaatccactgggaacacaacctgcacatatagggcctcatttcctgcctccttggatactggctcttgattaagttagtcctccaaaggactgggggtcaggacaccgtcttttggaatgtccacatattctggggaagcggaagaactcagtcatgggctcgcagtgtggtttgtgtactaacagagactttctcagagcagtccccttgcctctgccagctggagaaactgaggcactggacagtgaagcaagttcctcaaggtcacagctagcagatgctacattgtggtttctttaaaaaactaatagagagcagggcgcctttaatcccagcactcgggaggcagaggcaggtggatttctgagtttgaggccagccttgtctccaaagtgagttccaggacagccaggactatacagagaaaccctgtctcgaaaacaaaacaaaacaaaacaaaacaaaacaaaaaagtaatagaaatattatgagactatggttttgttttaaccccaggtgtgggatctggggctgctttagattgtccacagcagctgactgtgatttgcctcgtgctctagcagggacatggttttgccagtggcagacagtctgtgattgtgagacatttggaattctagggacttttcagagtgtataaatgctagttccctgagaggcaggctggattgttagttattgattggttggtttttggttgctgatggttgtgctttgttatatagtcatgacgcagaagaaagaagaaattaggtatcctggggtgagaacaaacttgatgcccctgatcagcagaaggtagtctaactataacattgcctcttttccgctctagtgttaggggggctgaaagggtgaagaagggcggaagaaagaagaacccacagagcagcagaagtcagctaccctgccctgtgctcactctgggcatttccacgtttcatcctctttcccatgaatcagggtcttacgcttccatctttcagatgaagaaccctggcggttcagagacaagtgaagccactcagctaaggcccaggggatggaacctgggcctcgtgggcagtagggattaaaaaaacaggtacctggccgtgtccagacaatggagtagtatttggtcctgaaaagcagtgagctgtaaaggtgggagaagacatggagggccctcaggacatgtcactgagtgtaggaagctggtctacaaaagcgccagagccattgaacaacattccagacgagttagggcagtgtcactacccatctgtccccagctctccaggcttatctcaagagaggagccacctctgggtcaataacacaaggaagaaatttaatttttttgtagagattcatcttatccatgacttcttagagacaacatttttctaaacagaaatgagtgtccaagccttgacgaagccatcggctcctgccaccttacacacacaagctgcccccagttgtggacccagagctggccaagcgatctggcacagagagtgcctaggcccactgagtgctcatggcccacctctggcccagcctgcctctcccatgaatgagtaatgcctgagacttcaacatgctggctgcccgagctccagttgaacttggctcttgagcaaaatgtacttttccaaaagacattgattcaactccacatgtattttgcaatgcctggcaggagggaggcccgcctctcccctgcccccaatgccagcacatgctgtcctggggagtggggcccacagaacacagtataatctccctcctccacccatctcccaagccttcccctggcatagccctattccttatgccagccatcacctgaagtatctgccgcctgcctctctccaggccctgacatagcacatactgctgaactaggtttcagatgacaccacaaaactggcttggaaggagaactggccaagacaagcctcaggctgtcctgacttagcctatcccaccggggaagcctgtcctgtagagccatggaaccaacgatgtgggtgcaggaagagcaggttggtgacgtcccaagaaccaacatgcacaccgtggacttgttctcttcaaagcacgttacttagagtgggagttggggtttgaaacagcttcacacatgggaccaaaggtctatgaccattctacatcctcagcctctaaaaagaccatgttcttaagagaacctacagcagtttagggttacagcaaaactgagtggcgggtagtgagttctcatgtgtgcctgctgcatcagcatccccagacggatgtcacccaaaggccatggttcacttgcatcccatgtccccggacgaaccacagatggcactccagtttctgtgactttgccatttggggcagctttctggacctcttatcgacctcccccctcccccaccacctttaaaatgggtctgagtaggcatgaccatgcacagctataatcccagcactagggaagctcagccaggaggattgagagttcaaggccagcctgggcatagagtgaatttgagggcagtgtagtgagttctgcttcaaaaacaaaaataaataatccacaaacgcaggagcgcttgcatcgaatccgcctcagtgaatatctggaaggtgtgcctcacgctcccatgcttgtgtccttggcagacattactaatccatctcagcatgcacacaccaggtcagggctcagcctcagctgcagggcttctagacctgtagacccgatccctttcatggaaacttccctggactccaagtccccattgagctctgcggctttcactcaagcctctgctctcctactgcctacagtgcagtgctccctgttctggtataagtgtgtatattgtcaagattcaaggctgaggtcacaagctgattggctgtcctcaagccaaatctgatgcatagatatttgctcagcagttctttttattctttaaaaacagtagttggccaactgttttttaaaaatagtagtgccacataagacctccaggtctctgggtttcccagatctgacaattctagggcctctccagtcacttcagggcctgcctggcccatttctccatgaccaggacctctggagccttattctatatgctctactttggagacgtgaggtgtggttggcttgatgtttctagagggaagattactctcctctctaaacgcttctctggggaattagcactaggcttctggtttcccgtatggttttcttcagagccagagccaggtgagccggaagctgtggaggtaagtgcaggctgtagtcattggcctgcttacattgatgctatctgtgactgtcactgccagcagggccggaaactgccaggctccaacactcagagctctgtacgttcccaggcacatgtggctcagtaggtcgttagttgcttcaagatgatattcctacttcaagactgctggggggccaggtgtgtgtgtgtgtgtgtgtgtgtgtgtgtgtgtgtgtgtgtgtgtgctggagaggtggcacagcagttaagagcactgactgcccttccagaggtcctgagttcaattcccagcaaccacatggtggctcacaaccatctgtaatggaatcggatgccttcttctgggtgtctgaagacagctacagtccatagctttgaggatgagataccaccaccagtttaagtaagacaacataaggctatgctgttcattcctgaacacaatacacatgggtttaatgactacatagtgaaggtgatgacagggctggggctgcatcagaagggacaggcgggtcagctggcttcagctgcaggaggaatgtgtgagctgagttttgaagaactaccttggacattagtctgttcctcccgttccacctgagtctgcctccctgcattgcaggaaccttccaggtgtgtgctggccactgggcctttggtcttgctgtccttgctgcctagaatgttctccttagatatgcacttggctgttggcctgtgtaatccgggtctctattatttgactccttgtcagacttagcaggcacctctctcctcactcctgcactgtgtcctttttcttcaaacgcttaccagtgctgacgtgtgttcatatctgattgttgtctttctcaccagagctcagatgactcgaaggcaggaaggtgacatcgctgtattcccagcacccagccctgtgccgggtccatagcagctactcagtaatgtggaagaaaggcagataggagagagagagagcgcagatggggtgcagagggcacagccagccatgtagaaaggcctgagggtcttccagagacaagagtataggtggcaccatgggacagagagaagggcagaccaaccaggcctcctgagacacagcctagctatcttcattttctcacagataaccagcctgtcccaggaagtggacattgctagccaccctcataggaaagagctctccagaaccggcagccaggcctgtgcagcccacttccttccttccttccttccttccttccttctctgggccccaccacagaggattgtgagaagtctcctcacagtaatgtgatgggcaaatttttcaagttcacagtttcctgccaggccccacagtcaaccatcccagctgtgaaggctgaccccagctcactgagtgaccgtgagcctttccaggaactgccctgtgcccgtggctcctcccactcttttctccagacttgtttcttcttgtctttctagaatcaggatctccatctgagtgtcttcttctctgggttttctaagccttactcttattagaaatagggctaagtctgtttttttttgtgccttgaattgccatctagttttgaagatcagatgaggcaatatgagttaagactcaagctcagtagacgtcattcacttccaggttaaaaccttcatctggtctttttatccagacccagccagactcgcccttcagttacttcccaagatcacagaatgctgtccaaaggttttctcagcaacactgagcccagtgacagacccaaaggacgtgcagactccactcaagggcaccttctgaagctattcctacaggctaccctccccagtgccctcctgagtatgagaaatactatccccaggccccaccatccagcccctgtttgttggttttaaacctgttggaagcccgcccctggcaggaagccacaagcatgagaatctagtccaggaatagcgctcgctgctcagcatttaaatgctgctgtatttttaccccatgatgggtcacttttgaaagccctcgctcatgttctctccctctaagaatacatttccatttatagcgtctgtccagggggtgtggggctcaggagagcatcctgtttcacttcaggggattcctgttcaccagcaggaaacctgaatccaggccaagccccaggtgtctttctacttccagggtctgagctaatctgactgttacaggctgggagacaggtgggggttcgggccgcttgccagctctgtactgcctgggtctccaggcagtacagcattgtggttctgccgctctggggtactctttctccttcattcacccaccaaatgctcacagctttctgttagcacaggttctgtaagggtacaggaggaccatgctgagcaggggcagtgaaggccctggaggggtgaaaacagttagggtgtggttgggaaaaattatcgctttggttcctcgtcaggctccagtccccattcagattctgtgagcctagacaagtgatttggcttctgtgaacctcctgcatttgttaatggtgttccctgggtggtgggcaggattaagcaagatagaaacaatcaggtgtctaagtagtagtacctggcccaggaggtgggagtgtgtgtgtgtgtgtgtgtgtgtaccctaggcccctcccatatccgactgttgactagggtaactcaggtgggtttaggctgaaggtcttatgaaggtgggtgtctgttgttctcagaaatgggtgtgtggtatctcaaatgcctgagcccctcctgaacagcacttagtgaccctcagcccaccttgcagtcaagcccagcatctgagaatctgatggtttcctggaagattctgagggagtgtgtatggaccccacttggaggtgtgccacccctccacccaccttgcacttgtctctcgggcctctgtggggtgcctgaggatctgggtctcacagtgtagcccagtggtggagtcaggcagtacacatgtaactgcaagcagagagggaagaaaagagtggagaggagtgacacagagcggtggctgccgtcccggaaggtgatgttggaacgcaggcctaggtgagagagtgagccatgctaccgcacaccccagatacaggaagttttgtttacagaaggttggtattggttcagaaatattgattggaaaactgtagccgtgattcgtgttttaaacaagtcccaagtagcataatgaatctgtcaccctaaagtctgagtgtccctctgtctagagcattcacctgtgtactgacagcccactatcacttagtggtcaccctagtcatctgactcagtgtcgtggtatcacggggtctgttgcagttaaccattatatttttaataatggcactaaaactcatgagcagtgacagtataatgttataacattctgttcattgctgctggcgtcttcctgtggctgctttataaattcaatttctcagagctatgcttaggaaagggtacctggtttcagggactcacagggtgtcctgtgggcagggagactgcagagggtggggtgggggtggggaaacacgtgcccaagttgtcccactgatgcacggaagtaagaagacttcttacttctgtatcttttatgttttatctgtcaagagaacccaagtggaagtggctgaatatgttttgtttttctaatgtaacataaggactggagatgttagcagttgtgggttttgctccagtagcccaaggatgccagcgactttgtctctgctgcctcagccctgggtgtcacatccacatctaagatgggagggtagcaatcaggatagtgtagttagagcaaggaacacctggccttttgagtctataatctaaagttcacagtcctacaatacttcatagcaaatgtcattggctgggctgctggagacatggcccagtgtagcattaaggtgcctgtcaggcaagcctgtggtcctgagtttgaatccccagcatccattgaaaaactgggtgtagcagcatgtgtctacaacactagccctggggtcaggataaaactaagagaatccctggggcaccctggctgaccttggtagcctaagagaacccctgggacaccctggctggccttggtagctgaggagatgagcaccaagctcaggttgagctgtatctcaaaaaattaaggtggtgagggatcaggaaatgtacttgccaccgtctttttccccatcatctcttgatttatgatggagatcttgtcacttgttctgtagagttccccatgatccagaggtggttttctaagtcctctaactggtaagctcaggagccttgggtgggtccaaggttggttctcttaccaagaagtttttctggtagtgctgtgcttttgcgctggtgtccctgagacttgcagtgatggcacagtggcctggcttgtctgtctaaggttcccatgctccatgggtatcccctggacaggagagcttgtgcaaggtcaatcttctgatcctcataggatctgcatttactcttggaaatccttctggaagacagaactttgccccgtcaactgttccatgacctagaaatagatattgtaaaagattcggaagaagtgttgtttgtctagcaggtggtctaccattgtttgttcagcatggctgtggtttggaaggcctggattatattacgttatttgatacattataatcatgaccgttattcaatttattggcctgaacatgacacatagttatgtgtcacctattattgctgtgtgcataccattatgtcatcctagcccagaatgtgtccatcactcctgagagcttccttatatccccacctgcagtgatcttctgcgacattttccagaatctaatatgaatgaaattaccccatctgaacccagttaactttacccagcctccatgcacctacccacacactatcccacattgtggatggtccacacttgatgtgcatggacatctaggtcgttttcctctttgaccaacataaggaaagcttcctgggtgttcctgactgttcctgagtgttccagagtgttcatgtgcacacccctgtgtatgtgtagttttgcagttctcctggcacacgcctagcatggcgtggctgggtcctacagtgaatgcgagctgtggttttactacagtttaactgttcatggcttacgaggctcagctcttcggcatgcaggtgtcaggactggcaggtgactaaggccctccacttagcaatcagccagtgctttcctgcagcatggatcagttcttctgtgactccaggaagtgggtcttgaggctcaggctgcttttgtgggaattagttaaggtcttaagggactgtattccctaaaacagagactgcatgatcgtaaaggaacttgacccctttctgtctgtctctctcacacacgtgcttcttctgtgcatacctggaaacttctccttgctatgtctctactgtgattcaatctagcacaaggtccgcccgccagcagtggatcagttgtggccacaatgtcatgaatggaattctacaccccaataaacctcttttcataaattacccagtacttcattcagtacagcaacagacagtagactaaaacagcggacttttaactttttaagaccttgctgaattcttctcagatggccacacagttttatgttctccatggcaacacacgagagttccaactgcttgattggtccatagttccagctctcctgataggcatagtgacagctcaccatggtaccagtttgggttctcccaagtgactttgatgctagctagcatcccttcaggtggactttgatgtcagtaaatctttgaggaagtatcagatcaaaccctttgcccaatcacacagtgtagggctttcagttaccgaggtttgagagttctttagcctggacttgtcttttatcagacatgtgattgacatggggtgtgtgtgtgtgtgtgtgtgtgttgttgtgtgtgtgtggtgtatttttccattctctgtgttgtatgtgttcttttaaaacacatctcttcttcagagaggagaagtttttttgttttgatgctgcctgattcatcagctcgttcgttcgtggatgtgctgatgcgagtgtgctctatggtgtctcatttgaaaagagctccacccagtcttaaatcacaaagatttgcttacagctatccagggctatgtatgtaaacacccagggagagttatttataatggccgaaacagggaaacaaccccgataggtgttcatggacacagacatatgtacagaacatccatgaatccggtactccttagaccaaagggatgcggggctgacaggtgccaaggcagcatgggtcagatagtgtgagtctgtccccggcagggctggccatgtcttctagaagaaaatgagcagatctttgtgagcctcaggacgtccttcctagagtcacagaagaactgatccactctgcagaactggaggttttgtttttaaggcaagactccattttgcccccctttttagaactggatctttgcctgttctaggacctttacctgtcagtgtgagtcttagaaccatcctgtcactgtctgtaaacttggcttgtggtggtttgggttggaagtgaattaagcacagagatcagttagggaggaagtgacctttgctaacactgacccattgccttagtgtgtacatccttcttagtctttaacacccctgcgtgcgtgtgcacgcgcacacacacgccttacacttcagtcaggtttgtcctgaatttttaacatttctcttagaactcgtgggcgtgatctctcaggacttatgggcgtggtctcttagaacgcatgggcgtggtctccggactcgtgggcgtggtctctcaggacttgtgggtgtggtcatctgtttacacttcattctcaccttaagtataaattgccatcagcgttctccactgtgcacccgactcccacaccacacagccctccttggctgcttccttttgagctttaggaggatcctggtgttcctgagagtccctgtgccccttgactgtgccaccctccacgttatggctgctctctagcctgggctctgtccctctcttttgccctgggggtttggccttgcttcagacattcactactgcagtacggtaagcaggcttctgctcgtaccatttcacatttcagcctcaaaaatactcattaacgggtgaggccttgcaagacccaaggaagagtccaggatgaagcaaacctggcccagcatagcctgctgggaggcttgtagggagctgtgtggctgccacagcaacacctcttcctcttcagccacacttggtatttgtgggaagggaggaggagaaaggccgggactcggtgtcacaaagggagttctgggactggagaagtcatgtgtgggatgatggggcagaagtggaggctgctaaagctggtggtcttgcagaggctggagggcttcatgtgggtaccaggtgtcatgacaatagctcagagactgggctggagggagaaaccatatccgtcttagggaccacacagcgacttctgctggacatcataccaaaccttcctctgccctcagcctgtcccctcctccaggcaggtgtgcggcagcccaggtagaaggcagatgtcctgaggcaaactgagctcaaattctagccctacatcagggacgagatggaaagagacacatgacctgacacatagggttaggaaatgatgaaatagtgaggcaaagtctgagcctggagcacaagtgagccctgatcacaggggaggtgggggagggggagagggaggggtgggggaggggccagcaccattgtgatgattcttatcatcgctgcttctcattcagcctgggctgtctcctgccaggctgtgtcccatccagtggacacgatggtaggaatgcatattaccacgtagaatgtcccttcagggttcctgtagttacagcggttccaaggctcattctcaccatgcccctcaggcctaggcctgcccatttacctgtgtgtgcatcgtgttcacacatccctgcctcactgatgctctgcaaggtgaaggaatgactaagtgtgtatgttcggcctcactccctggccccacgccaagggctttgccaggccagtcgacagggctgaccaggccaaaggtccagctaagtgttttaacagctattttggggaacaaatgacccactacccaatgacctgctcctcaatagatgtcatataatttcattaagctttggaaacaatgacatcctgtcttggagccacccacatccagggaagcacagagctacagagatttaactgcaagagcagggagaagcgaggcccagggcgtgcagttaaatagctcagctaaggcattgcactgtggaagggagtcacagatgaagtcagtgagcccttgcagcaagcgcttcccgccggggtggagaagtcgcacgggcactcgtgtgtgtgtgtgtgtgtgtgtgtgtgtgtgtgtgtgtgtgtgtgttttgagtcaggctgtggccccctccctcaggctggaggtggactgcagtctgaatttctgtgagtaaatcttcttcccagtgctgatgttaacatatgttcccacggcaccatttccttcttagcaccgagggaggccttgcacagtgcaccgtaaaacaaatggcacgcatatgtaaccgtgccttcatggcaaggcggaaggcagacccaggctgtttgaccctcttcctgtaggtttctttgctcagtttttccacataaactttgccttttccgatacagagtgagaaagaccaaaaaggctacctaattccaggatcatggtgtctgtgggaccgacagggccatagctgtgagttcactagcaagagcagatgccctgaagcctctagaggaggacacagggtgggtggggcatgagcccgtttcttgctgttctattctgcaaagaacaggcgtttttggccacaggcctgcggacagtggttgtagccattctccctgctggagctgtctctgcagctggaaagacagtggcatctctggcctccgcacactaggtgattccctgggaaacacagcggcacctttgttcctcacagatcccctggcgcgcagcttctcaaagacacagaagctgctggtccttattgtcagtttgatgggatttggcctcgccatggaaatacacacatctgcgtgtgtctttgaagatgcttccaggaaggtgtaactgagcagggaagactcaaccctgaatgtgggcagacagcaccatccagaaggaccagagatcccaaactgaataacaaagagctgaatgccaacgtttatctcttcctgcctcttacacgatagcttccttacagaggacccaggatttcgggtgtgtgctaccatgccaggccctgttttaaatgcttaccctgggtaggctactcttcttggggggcctctggtctctcttctaatttgagaggtaacatggggtaactgcaggacaggacgtttctagagctgagagtggtgacaggtgtttggggctctctcagcaggtggtcacagtcctgtctgcccatctctctacccactccaggtcttgctcccatcccattggcttctgcacccaggctgggcttccttcagttcaggttggccttttgctttaatatcatgttattttgccttatttgagaaaaaaaaaattcctcaaacctctatcaaatgacgaccgtgtgtgtcaccttggctgccactgaccgctgtggctgcctatcgtgtttcagggccttggttgatttaattttagtgttgttttattttgttgttgtttggctggttgggtttttgtttgttttgttggcttgttttgttgtatgtgtgtgtatatatgtgtgtgtgtgtgtgtgtgtgtgtgtgtgtgtgcacgtgcatgcacatgtgtgttcactctcgtgggtgtctgagaaggccagaagttggcattggtcaccttctcaatctgttacctcccctctttcatgtgtttgtgtgctggtgtgtgtgggtatgtatgcatggccatgctggagggtatacatgtgtgtgtgtgtgtgtgtgtgcatggagaagcccgaggttgatgttgggtatcttcctccatcagccttctgtctgtctcttttgaagcagaatctagagactggaatgagaggtgaaccaccacgcccccaggatttatgtgggttctggggatttggtcctttgggttgtgtggtaagcactttaactgctgagccatctccacagcccaagcttattttgtgagctctctcattgaaactagaactcttttggctacactggtgaaccagcatcaggaaccacctgcctccgttcgcaagggctagggtccaggtataaacgagcttggcttctatgtgcgtgctgggtttgctggagtgctgggtggctggtaccctgagccatctccccaggccccactgttttctttgctgggacagggttttgctctgtagcccaagttgacctggaatgtatgctcctcctgccatagcctccaatgtagactaggtgtccagcctacaaatgctgaccttcctctgggctcccgggcagccttgggcctcatccttttgatggaaagtctcatgtagccacagacttgctatgtagcagaggatgaccttgaatttcggatcctccagcctgcatcacacacttgatatatacggtgctgggtcagggagggaaagccaaaggctttgcccacagtttgttgttgttttgagactgggccgctctgtggccctggctgtcctgaaactcactctgtagaccaggatggcctcgaactcacagaggtcccatcagcctctgcctcccaagtgctgggattacagacatgcaccattgcgtccggtgccagtcctcattcttgtgttggtctgttcattggctgaaaggctaagactaagaaactcccaggtgagactcgggcaggaaatgaacctactcttcacctttctctgtggcggctgagcagtgacagatcgtgaacctttcttctgaagtagaatcagtgagaatgcgaaaggcatcggatccctctgacgtccttcctttctgacctccatctgcaaaatgagagcagacctaactccggccggtgcggagagtcagatgggagcacaggtaaacctcagtacataggcagcagcaaacatcctgtttctctcctgtattctttaccctttcctccacattctctgaggcagaatggctaagactgatcgcatcaccactgcgaggacctgactaatccgagccagagaggatgcacagctcacttcctcatctgtcacatgcctgggcttctcactagcctgctggtgggccagtttcccagggacagtcactcctgactcacttgttttgtggttacctctgaaaccaggctccttgtctgctctctctttaccccattaccactctccaatttgggtctgatgtgtgggaatagatctctgtcacttgtcacaggtggcctctgctgagggcagggaccatatctgccttggccagttcctctttcccagccttctagaacactgctgcatatgatgcctgtttactgtgtatttgctgaacaaatgatggatttctgaagtttctcttgcctaccgtgcagcatccttgggaaagtaaatgatttaagccttgagaccttggtctggcccccagggtgtggggtggggagaagatgatggcttggagactccactccaggctctgcttcccaggagctcagtgacatagggatttcccaagagagtgggacaccagtagtcagagaggtgggtactcacaacaaagctaagtgtgtatggtaaaagggaccaacctgggctggaaggggccgttcagcatcacgatttctagaacttggcttcctgtgctttggtctgggtctcacctccctgttacagcttaattggacatctccctgtccctggtcccccaacaggccataaaatgtggcttgccccacagcacacagcaagcttggtacctctaattcgggtgcccacggggaccaagcttcttcccaaaacaacttttgagtggcagcttcatttgaatttttttccatccgaattttaaaaataatctctattcattgtgaaataattttatacttatccccaaattgcaaaaatagcagagttctcatatgccctttacccaagtgtccccaaaggtcagcatcttacatcatgtcctggactgggtctctaatgtccccagaggccctgtgcttaagggcgtggtctccagcacagcagtgttaaagcagattggatgagggctccagcatcatccgtggactcaaccactaatggcttcagagctcaaagcttttgggatgaaatgggaggtttaagagctggagctgagcaggaggaagcaagtcactgggggttgtcctggaagggaatcttgtccctggtcccctgccctctgtctctctgtctgtctgatgaccaccttcctctgccacctgctcccatcactgaggtgagatgccctactgcaccctaggacctaagcagcagaagcagccagacagactgagacctgtgaagccaaaacagacctctttcttctgtgaagatggtcttctttggtaatttgttaccgccgtggaaagctgtcccacataaccataatgccaccatcagaacacaaacagtgacattatgtggtgctatcagcgacgtcacagggcttgctcagtgtcatttccagcgtaggaaatctatcgtgatcccacaccaagttcagttatcatgtctcataagtctcctctatttgggacagtgcccaggttacttttataaccttccaagtggaagcctcccatggggactctgtaccaagtccctcacgggaaggtttttcttacttgtcagtagtagccctgcatttatagacaaggaaacggaggccactagaagtaaaaacacacatggcaaggaagagcatttaagatttaaaccacagaaatccagattccagagtcctaacccctacctgactgagaacaagacagggtgagaattcaatttgattccaaagccccgcaatcccccatcatattccaggacttccctggtcctggtgatgtgtttaggagagaaaagctggggtggacaaccagaagcagagccagccttacctccagctgaccctaccttatcctgcaggcagaagctggcagggaagacagggacagtggaccaggatggggaggtggaggcaggaaaagggataaagagatgacacagagtgagaaagccatgtcataatataatggtgtcaaagagacatagagcctcccagtggctccctagacccaaatgttacctcagttcacggtgctgttactgggcagtgcctaccgcctatcagcctgagttagggacaaggcctcgcctttgcctggcagttacattctggcagaagcagggcccaccaagaaacatgcacatgtataaatatatgagtgtgtgaaataatgggtaatgagctggggtcctcgctgagacatgatgggatgtagcagagggatgtataggtgggctggctagatttatgtcaatgtgacacaaactgtggtcatctaggaggagggaaccaaaccttaattgagaagatgcctctataaggtcagactgtgggtcagcctgtagagcattttcttagttagtgattgatgggacagggcccagcccattgtgtatgataccatccctgtgtggggggttctgggttctataagagagcaagctgagcaagccatgtagaacaagccagtaagcagcacctctccatggtctctgcatcagcttctgcctctaggttcctgccctgcttgagttcctgtcctgacgtctttggtgatgaacagtaatgtagaagtgtaagccaaacaaacccttttctccctaatgtactttttggctgtggtgttttgtcacagcaacagaaaccctaagacagtaggatccttgtaaggcctctcagaggaggctggaaaggactctgctaagagctgtggttgctgacccaggtggcatgctgccagcaccccgtctctgcctgtaccctacacctgtctaatccccctgtttcttcttcgcaggtttgacatctacaggaaggtgcccaaggacctcacacagccgacatatactggtgccattagtgagtaactgcccttctcaccattaacccaaccctctgcctagacctcaaatatccatgctcccactctctgcagatctctggagaaaggaggaaagaaggaaaggcagatgggagaggagacatgcctagcatcccacaagccctacatctctctccatgaagcatctctatccttgctatataaccctgcaaggtagagtggccagctgtaactatacagccagggcagccagccataactagaaggatgcagaaaaataccagtgcagggtcaggatccctgaccttagagtctaaaactaagtctcctagatccagaactctctgagaggatctagcatgcactgtaagtggaaagtccacccctggccctgtgtgatgagcggctttgaagatgtgatagtacctccaggctgtaaggataagtgcgccagaaacaggagccacccaaaatctaaataaagaccagtgagatgactcaacatttgctgtgcatgactgatggcctgagttagagcctcagaacccatggtggaaaggcgtgcgcgcacacacgcgcgcacacaacacacacacacacacacacacacacacacacacacacacacacacactcatcatcatcaataatagcagtatattaaatacaaaaattttaaaagtagccaggtagtggtggcctatgacttaaatctctttaatccagcatttgggaggcagaggcaggtggatttctgagttcgaggccagcctggtctacagagtgagttccagggcatccagggctacacagagaaaccctgtccaaaacaaacaaacaaacaaacaaacaaacaaacaaacagacagacagacaacaacaagcgaacaaaaaaaagtccaagcaagcagatccgaggtatgggagggaggcatgctttaccttcctgcttttgaaatgatttgaattgttaataattttagccactaaaagaaatcacaaactcactctaacttagttcaattagaggaactaggacatctcagaaaagtggccatttgcaaccccaggcaaggaagagagtttcgcgtcatgtcagcaggacaaaaggacccaaggactcaaactggagcatgactctggtggactagaacccaaagaattaggggaaaggcctttgagcctgtcataaatgaactggggaggagacgaactcactcaagaactctggtgaccctgtgaatacccctccctccctctccctcaagtgtgaggcggctgtagcaactcacttccacagaaaagagattagaagtgtaagatggtagctttcctgtagggaaacctgcagatggcagctcggctgtgggagggaagttggcaccacctcgattggtcgagtggatgaatgaacgcctgatgtaagatgtgccttgccactgagggatctttcccactaagttaccaccctggcgaatgtgacagagcagcagggtcccagcctgggaggtcttctgccagatacctggcctgtatgctgctagaggagcaaagctgaggggagcggagggaagagggaagggtaaattacagaagggctcaggaggaggaaactcagggtaggagccagaatttgttcctgcctagaaacagcctttctggaagctggtgaaacctgtggccgagttaggagcatgcaacagtgtggatccctccacactgacaaagggtgaccgagtaccatggttacgtcagatgtgaacagggcatccaggagaagctgtgcaggcactgtcctggctttgcactgattgctgttccacaacagaaaacacccctcaccccttccccaaatatttagaacaaaccaaagtcaccagcaaggaagtgggtaggctttggcttcacacctcagatgcttggggaagggaagtgactcatctaaaatgtcactgcttacaggaggggcagttgggattaggtcttggatgccccctgcatgcttggtatggggcagagagcctcacaactggtccagccttgctgtgtgaatggaggccaggctgtcagcctggagtctacattctcaggtagattggtgacctttggggatccctgcaactccagctgtctctaacgctctttccagctgggtttcttaaagcagcaggcaccttctcccgttgtgaggaaaagatggctcttcctgggtatttgcaggctttcctgtgaggaagaaatggcttcatcctcttggttagcgcctatgtgtcctggggcaagtccctccacccccagccccaggaaaaaagactttcttagtctatgagaaacgtggccccctccgtgccaccacatagcagtcccccctccctgcagatctctctccagtcgttacctaacctgttgaacaatcaggtattccaggaggtactgcacattgtcctgctcagggaccagctgtgccatgcccggctcccttgtctctgttgctggacacacctctcccacctccaccaacagctctgccttctatccagctatctcctgtggcatcatgggtggccagcctgattctagcctattgtcacacaaatgtccttgtcatgtttttgaatcttctgtagtgtcactatgaggtagctctccggggcttagggacactgagtcaaaggggacgtgcatttgtcactgtttagaaaattctgcctggaatgcagccctcaggaatgtggtttgatgagcttttccttacatgaggggaagatctgaggcatgagaagccagcccttagctaccatttagtacacaaatatttattaagctggacctagggccagaccctgtgccaagccgggaccgtgctgatgaatgggcttcggtctttgtccttgaggctcaggcagccaagccaggcaggccaattcaggcctgcgccattgcattatgctgtgggatggttgctattaatagctgaaggagacagcgaaattctggggcttgaacgtcagcctatggattttgtttcctgccctacaaggctctttcgacctcagagggactccttgactttctcctgggatataagggtctcaagcttgactccttcaacttggcaacacctggcttctactagcaagcctctgctggggtcacattccaacttcccagggcctgagtctggagtcagagagcctccaagccttgcccaaacatggactgaaagccttcatccagcctttgagagctgaaggtcttgcttggaatacttcctccctgctttcatggtttctcactctttcagttattcaataaatattttttttctgtgccttctctgagccagcaatgttaggccctgaggccacagtggtaccaagacctcacctctggttcctctgtctgagacaggagtcaggtgcacccaccataagtacgggtggggacagggccattggaccccactgagttatcctgtttacctgctgggttacccgggctttgtgccaagccttgcggagggaagcacacagatctcagagaaaggcctccccaatctcattcccctactgcagagtgggtagttaggactttggggtgtatctgcaggtgtgaagcagtaacagcagccagaagactgtcatttattctaaagtcagcagcaatgagcctcagaaaacctcctgtgccgtacactcactgccgcgtccgctggggctggtgtggacagaatggcactgaaatgtgggtcctgggtggcactggacagaaaggcacaaggtctgactgcaggaggcttcgcctgctgcaggttcttccccaagaggcagtaactaccagtgtaggcaggagagcaggagccaggggctggcttggtatctgagcttcccccagcttcatcccccagctggaaaggatatttgagcttaatctccatgccgtggacagtacagaccaaggccactgtctgggaccaaactgttaactgttgctgagtatttgaagcatggctgaaagggggtatctgtcatgctgttattaatttagaacaaaaagggccttaaagtatgtatatctgcatatatatatatatatatacatatatatatatgtatatgtatatacactttttcttctgttttgactttgagtgagagtcttggctagcctggaacttgctgtgtagtctaggctaggcttaaaattcggccagtccttcccacctctgctcttgaattctaggcttatagatgtggccactaggctggccaataaatacttgtggtgtgtgtgtgtgtgtgtgtgtgtgtgtgtgtgtgtgtgtgtataatatagtacttatactatattatgtaattattaatacatgatgtttaatagttacatgtgcttatatgcccagctgaaactttttcttgtttataatatgcacacattctctatttctccccaaagtaaagcctctaaatgccatctctatacagcttcatcaacgtggggcagaggttatgagtattccagtccccatctctgtagctacagactcatcaggcagtttgggggtatcccatcttacccttgcagcccaggttctcaggagtctttctaggggcttaaccatagaggatagggggggtcccagttccttgtcgctcagcctgcgtttctaccccagagccaccatcaggctggcaccatggtgtcatggtggggtagtttgttaatgtaccaccctgggcatataaatagtaggtgctcaaaaatgattgtccttccttccctgaagacagataggaaattagacaggcggcagacagacagatggacatggatggagatgcttttccactgttatctacagccctgtgtcacagcaatgctgctgttagttcaaaagagcagaaatagaaatggaagtccattccagtgtgtggcacacctcagctcggcctggtgctgtgctggctgtccctatggagaccgcatgctgaccaggagcaatggccctctgccactggccagcagcaggacaggaccgtgcctgtcagtaacctgggaagagaggccaaactgccgtatggtttctggtgagggagcccactctcaccctgttgtaaagctgacaactcccaagatggacgctggctacagacagagagggccagacctgtggcaagctgtgccaagttcagtctttggttcactaacgtgagagagaagtcaggtggtcacatgggatctcccagatgttcagtgagagaagtcaggcggtcacataggatctcccagatgttcagtgtggatctgggattctagcgtgcacggcattcaagcaggcaaagcaccttgcccaccagcatgcagtcctcttccagggcaacctctgcatcaaagagatcttgaggagttgagcagggcccattgcctgtgtgaggaggccagtctgaccacggggccgggccagtggccactttctggggaaatcacactgaggccataaagtaagaagggatcccagtgaggcagtgaataagagggcgccttgatgatctctgcagaggcaccctcaccctgtatgtatgctggtgcctctaagcagctttcctccagggtagcaggagggcagtggggactggcctcccgtgtggagcatcctgcacccctaacactgtctgtgtttcccacagtctccatctgctgctgcctcttcatcctcttcctcttcctgtcggagctcactggattcatcacaacagaagtgtaagttattttctctggggcagctgtcttgctggggtccagatgagaagagggggcgatttgggaagggatggaagccttgcaaccggcttgcttctatttccaagcatgtgacatcataaaagggctttgagctcaaagccaaactgagcctcactctgtgaataccattcacattccttcgggcctgggatgcccaggttcacaggcagagtagaatcacccactcatcaccactggccccgagtttggccagtgggtttccatgagtcctttgatgttgtagctggaaggtgctcagacaacccaggtagcttcctcacagagggcaaggtggtcctcctggaagcccctctcatttctcaggcccacgttcaggagtcagcatgggtttcctggcatctaataccacagtcatccatccctgattccagaattagttgtcatccccagcctggtaaccctcctgcgtcgggtcctgacctcatgcttcaaagcctctttgtagctgtgtttacagtttgtggaactgtcatggggctgggccctggcacccccttctcttctgcccagccttggaattttctctttctactcttggaatgtcttggtttcctttgcttccttctcagccatgagacaataggaagctaaaaaccaacgtcatggctgcagctggatcttattacctttgtcaccaaacagccccttttttatggggaaactgaagttatatgaagtagcagtacttgcccacagtgatcaagtgaggtggctcctgagttctgagaagctgggttcacctggtcttagctcacatctggatgtagctgcccacctgtcactgatgtgggagcatctgccctgctgtcactctgacactggtttggtttttttttttttttttttttttttttttggtttttggttttttgagacagggtttctctgtgtagccctggctgtcctggaactcactttgtaaaccaggctagcctcgaactcagaaatccgaatgcctctgcctcccaagtgctgggattaaaggcgtgcaccaccacacccggctctgacacttttaacccagggagtttcatgggcctgtggagagaacaataagacattagaagacccagaatcaggatactacttggctgtgttaccctgacaagttcctgaacctctctgagtcaaagaagtgagagtagatcagacttcaactccacttccagctctggtgctttccatgataacagaccatgtagggatcatcagaagtccccccacagtccccaacaagtgactgtgaccatggggagcatcctctctgtgtcctatggctttgggctttggctgtgtgctcctaaagctgctctctcactacagtgcctctgtgtctgctggctgtggacacaagcaaaatatactgcagttattctaactaactatagttacctttgggaattcgtttctgggaccctcacttcagaggtcccaatatttcagtacaataggagatttgcataaatatacatatcatctacataaagctacatataatcctcttatgtacattttatttttttctgtaagagatttgtttttatttcatgcatatgaatgcttatccgcatgtatttcctgtgcactatgtgcatacacggtatgtgcatacactatgtgcatacacggtatgtgcatacactatgtgcatacatggtgccttcagcgtctagaaaagagggtatcgaatccctcagcactggagttacagagggttgggaggctccaagggatactgggaagtgaacctgggttctctgctcgagcagccagtgctcttaaccgctgaaccatctcttctctccagccttttggttttgtagttttgctttctgtgacagagtcttaccaggtcttactacgtagcccaggctgtcctcctgaggactggaatcacacacagttggatgtcaccactcacagtcttcctctatctacttcaaactgtcttcatcttacttgaacatctaatatgtcattgcaataccacaggggagtagtgggacagtattatgaggtggatcgagatagtgaggctgggagagggaggacacaggacgggcctggtgctttctcaagattaaacgggatggtctgggtaaagagtacttaacccaaagcctgtggacattgtcacctgacagactgtgtctcttggtgcctctgtgtttcccccgtaacacttgaggaagccttagtcagctcagcccagtgaaggcatgccttcagcactgaggcatggccacatcccaagtgacctttgttgtcagagcttgggcctgcaaaggctgtgtagcagactgggccactcaagcaagcccagacagtagactttgcccactgtttacctagggcagggctgtcagagtacagtgtgttccccatcatacccctccctgtgcagggacttcctcttcctacctcctggatgctgtggtcccaggaggaaggaagagggctgaagagtctcaagcctggcccgctggctacttgttgctgttggtgggagcctaatgtccctcccttcttgtgcttccttaccatggtactgacttgtcaggggtccaggcaggcccaagacttaacactacagcctggaaatgtttgctttgccccattgggcccctttctctatggaggcagccctgcctggaaagcatataggttttctctatggaggcagccctgcctgggaagcatataggttagggggaaactgaagaggggttcattctctttcgggaggccactggtcctgtctgatgactttgctcccacagagggccaggggatcccctcttgccatgaagatgttcataactcaaggaaacgaggtcatggcgcagccctggcctgtggctgccagtgacgtgaggtgctccttctggccccatagagttagagggaggtgggtttgtttgtgtgcttgacttccaacccaagctttggccaggctggtgacaatggggaaagaaggtgtcccatgggattcagttttaacataatatctcttttggtgctttctaggtattgtaatgctagtctcatatgcccaggttagcatcttccaatgattgcctcaacattttataaaaccccttgaagtttgtggaggaaactggggcaccaagaagctaaaaacctgtaaggttcataaaaggggcaagggagagcagagtctaagcccaggacctgtgcacacctacagcgtgggcaccctaccccgtcatccctcccgtgtctctgcggggcatgttttaaagcctcaagtcatgaaagccacagcttttgggtaaaagttattgatggttagggacagaagcttcagcaggcagagcttgttcttatacaagcctgatggcctgagttgggtccctgggacctactccactccacaaacttgtcccctgacctccatgtgcgtactcacacacgtcacacatacgctcattagtgatagtacattaaaattaaacttcaaacctatggactgggagactcaagattcccctgtagaattaggtggcaaactagaagaggccacttcaggaagcaggagcttggaggttaccttgagttggttcctaaaacatccctgtactgagccaaaattggggaaactaggagtttatccaagagaagagtggggggcgccatcccgcccagcacccctgaactgagtctcagttgtagctggttgggattagactgttaccaagaacatcctcacccttagcgatgggaggtttaaaggctcctgggcacagagcgacagatcatccctgaaaggtgggtctggggaggggtgagtgtgagccacagaccctggtaaggagtccgatgattgccaggaggaagaggggtggctgggcagctggttgtggagggcatccacccagtaggcagcagctgtgttttccctgtgttttagaagtcagggtttaaaagccaaggttcctgaggcttactggtcaacccacccgccgcctcatacacctcccctcccactcccacccaccagtcactgcggcctccatgctgaatggaagtttccatttgaccagattgttaagcatggaggccagcaaccttgggcaggaatctgaactatttaagtgctcttcaaaaaacaaataaaattgttttccatagatgtcatcaggctcacgcctcagcctagaatctcaaggccttcggctacattccacctacatcccccctaccagtacctcccatcctctctccctacaaggccagttctcacctacctcctccccatgctctggctggtgccccccacctggaatgtagccccattcctccaccagcacacactcttccacttcctggaacttctgagaacctagcacccacactctcctgtgcaccccacaagtttgtgtccatttcacagaaggtgctcaggagttttcattctggttgggggttgtgacactgtggcttcctctggtgtgacagaggaggggttagagggaggtttgcagaacagaaagtcattggacctagggaacctctatatcccataggccctgtactggctagttttgtgtcaacttgacacagctggagttatcacagagaaaggagcttcagttgaggaaatgcctccatgagatccaactgtaaggcattttctcaattagtgatcaagggggaaaggccccttgtgggtggtgccatccctgggctggtagtcttggttctataagaaagcaagctgagcaagccaggggaagcaagccactaaagaacatccctccatggcctctgcatcagctcctgcttcctgacctgcttgagttccaatcctgacttccatggtgatcaacagcagcatggaagtgtaagctgaataaaccctttcctccacatcttgcttcttggtcatgatgtttgtgcaggaatagaaaccctgactaagacaggccctgaggccctggggtggtacatctgaagatgataagaaaagacagtgacacttgcatcacaagtctccctaggggatgccctgctttccagggatctctgtcctctccagacagtgttagcacagtaggaaaggcaaaacacgagtgcccagtaggtagcatcctcctcttactctcctaggctgtgtgatctcagccagttatttgttctgctcgctgaaaacacagtgatcctgcccagcactgcttggccacgttacaggagctgccacatgcaaaagcccggcatcttccagcttttagtggggcagaatacacgtgcaggcagagctgcactaggcctcttacatgcataatgcccttgaccttcacactggtttgccatggattaggggccctaatattttatctcattaaatgttggtgttgataataaagatcatggctagaggctgagcattcaacctgtaatgagactgtgctcaagactctggttctcattggccacctcagcagcctcattcttgatgtatacagagtcattgggggttgctgggacatagagagcatgacattctcatgccaccagcgcacctcctttacctgtttcagatcccccagataacttatgctaccctgtgtacgtaccgtgtgcatagttatggcaccatattgtgtaaggagcaaggaaagaagtctgtgtatgcccagtacagactcagtgtctgcttctgaggggttttgttggttttgttttgttttttgagcttcagctggttgaacccaagggtagaaactctatagcagtggcatatcaactgttctgggagagagcccctttttatttctggggaaaccgaggccattgagaacaaaacccattgtccaagctcagtctaccaggaggcgctgcagccaggaggcgctgcaaaccttggcatcttgggctccccttagcattgtgttctctctgccaagcagagcctgtggtcagccctggagagaaaaagagacacgtgcttacaccacacacacacacacacacacacacacacacacacacacacacatgccctcacaccacacacacatacatacaaacaccacatataccatacacacacacaccacgtacacatacacatgccacgcacacacatgcgtgtacacatgcacacacagcctggcctgctgctttggcctttcagtagccccgagaggtgttaattcttgctcgtctcctttttccctactgttccttcactggttccctcggtgaggtgtgtatgacttacagcaggtgcacaagcccagaactcagtgatcagtgagtctccccttcacagtatcatctcagctgagccaggatgcacgagccatgacttctgctttctagaaggttcttttgcagctcctcctcctgccattctttagacttctattgtcctgggttaatttgcttcttataaactccacccaggacttctccatttaccctgatgaggaagctggggctcagaggtgaagcacctgtcccaggtacctcatcttctaagtggcaaaaggcccacacgccttcttaccgtatcctgagctggctatggggtgtcaggccagtaagagtccctaagctgtagtatacccacaaaaatgttccttttcttcaaagcgagctgaatgttggcagactgtcagccttttaaaatcggctcagccccagccagtggacccggtcagccttggcagccctgcacgggcggctgaggctgcacctggggtggcaggaaactagctggcctggaacatttcccttggacacagaaggcagccgtgctgacctcatctgtaggcggtgcagacaactgaaccatatacatcttacaggcaggggaacagccagttctgcccttacataaccactggcccaggttgccacaggccatgcatttatcctcccctcgggcacctcagcctcttcgtgctgtgtggcccttcagccctggcagctgaccactccggttcttctggctaggagacagggagccatgcctgggagaagcctccccaggggcggtgagctcacctgagccacacctgggatttgcctcactgctgaggtcatctcccgggattgccaagaatgacctcatcccataatccccaagcagtgcgcagatgtctaggtttaccaggtgggaaaggtaagcactcatggaagagtctccctgggaaggggagccctctcccttggctgctgctcagttgatcacacagcaatttccttactagactggcagtcctttggaattaaggctgtggtagacataggtgctgaaaatcaggagggcagaaacaggcccatggcctgtttgtcttttgcccactggtactgtccaatacctaccagtaccctgagcagtatccttcaccctgcataatgaggagaagaagaggaagctgggtagccctggaaaacttgagcgtgaggttctagctcagctgttttgtgctgtgcactcttgggatagaacacccctcctctgaaccttggtttcctgggtgtagaataggaacgaggactttgcacaggagcagatagggtgacacagatgcgtttatttggctttcttgattggcatccctctcaccttttgcttaatgggccgagtattcagcagcctgaagagcaaaatgtgtctgtggctttcatgtccccacgtatatatctgtggttcccacaaagtaacaaactgttcctgagccacagttctcagtaattaagcactatatatcacatatatagtatataatatacactaataatagatcacatgggatggggcctcgtcgagacagaattcacttgttgggcctgatctgttctttcccaacaggagccattcccagggctccctgtgtgtaggacccaagggacctaactgatctgggttatatcatttgttttatagctttttaaaggagaacgtttatcttttgtttgtttgtttgtgggaaaatattttttctttttttattagatattttctttatatacatacgtttatcattttaaagtgtgtgtgtgtgtatgtgtgtgtgtgtgtgtgtgtgtgtgttctcatttgtagaggcagaagagggcattggttctagagctggggttgcagacgttgtgagctgcctaatttgggttctccctaaatttgagtccctaaaagagcactaagtgctcttaaccattgagccatctcttcaatctcatgttgtttcatttttaattggcaaaatggggcacaaggtaatattttgataaactgtcagattaccagctcatctagttagtatgtctattaccttaaacaaaacatttttgctgtctgagagacatttaaaatctcttcttgctaatttgaagtacacactgtgttgttattgcagtcaccatgcctgtgcagtagaacagcaggacttctgttatctgtatcttcctctctattggccagcatccctggtccccatccacgagtgttcaacatagcccagcccccgtatccaacactgctcagttgagcagcctttgaggctaggcctagagatgggtgtcctcctccccgtggggaattatctaggcagctagcctctaaattcagcccctctccctcctttctgcctctgctttatcttcgagggcccctggcttagtgaggaagggaagacctggaagcatccacttccatgcctcttgtggcccatccctgtgtatgccatcagcatgccatgcctgttcccagcagccatgggttctgaaccactatggacacctacaatctggtgtctttgatacacagtggctcctccaggtctcaagcctgctgagacacaagctttctatgttcagtgtcacgtacaccacctgtaccccagcaccagaacatggctgaaataggtcacacttctttggctcttatactgcatctgctgtgacccttgcagaccatgagactataccctccctacttcaggccttggcacatgctctggggacctccctccccttgctgagaccgtgccttttttagcatcttagactcgaaggcctctttatggcatttacctaggaggtgagtgaggtctggttctgcttgtgaccttgatcaaaacagagactagatccggcttgatgccatttcttgaacctgacaggactgagatgccaccaaactgttgagtggatatgtgttgctactgtccctggctgtgaagtggtgtggctgtctgtggccacctgccctgtaacactagtgatagaataatgatctcgttgcttgctcctgcagcctaaggttgtgctacccacatgccacatggaacatgacagatgtggtcacatgaaggatgggaatggctatgttagcccgacgggccacatagaaccacggggtcctgtgtgagggtgcaggagggagaggagggaaggtacggggcacacacgtggtaagctttagttaagcctttggctttgtgacacttgattacagcagccctaggaatccagtacaggcgtctggtcctgtgggagacctggacgtcacccctgtgactttataaggaggagctccataaagcacaggcagtggaggctctgtgcctgttggtgctgggccatgagctgtacaggactctgcgcctcatcttacttttcagcagtgtcactccattcagctgatgggtttatagaggtgaccgtaggaagtactggaaccaggatttgaacttgagtctggacagatgttcttaccagacccatccttcttcctgagtaactgctctccctcctggtgaagctgtattggagagtggctttaaatctggaaccctaactcctgggacctggacatgtgcacactgttgtacccacatggatatctggatcactgagtgctggccaccaagcaaggtggcccctggctatctatcccctatgggcagagtcggtgtctccttctcagtctagatttctgtacttgtctgtccctcagggtgaatgagctctacgtcgatgacccagacaaggacagcggaggcaaaattgacgtcagtctcaacatcagtttacccaatttgcactgtgaatgtgagtattccaatagacctctgtttcagctagccagcctgtgggtgatctgtgtgcagatatgctgagccatctggggtgagcatacgcatgtgtgtgtgtgtgtgtgtgtatgtgtgtgcctgtgtaaatatacatatacatacacatatacacacatgcatacactatacacacatacatacctgcaaaccacacagagcctatggcagcccccacctgttttctggaatcatagatgcctcctgtactctgtagagcaaccacatttgtgcaggtggcgcagggtggtggagtctctctggttcatccagcctaagacccttgagcaagcggcttacggagaggaagaagctttgagggagggagagatgggacttgatcaggcaagaggatgagcccagatgtatgtgcggctgaggtctggtctgaggctggcctccctgcaggagactcaggaacgtggcgacaccataaagccgcctcttctggcaacagtggggccaggactattattatccccgtcggtggctgatggccaccgatggttcctatgggagttacatgacctctcaaacagttatggtgagatgccagttgtgcaagccccagccctttatagcccagagctgcaaaagccagcgggaccctcagtgagggtctttttaactatatcttcctttttaactatagatctcttcatttgctattttaatcaaaaatagaattatttctataaaacaaaacacagcaaaaatctgatttggaggcagatcctgcctcctttgctcaggtgaaccttggcttcagttgtctgtttctcctttagcatggtagacttagtaaccattaccagagtttccaatgggatggcatctagcttaccggttattgtctcccgttgtgaaggtttgatacaccctcagccccactaggtctgcagcctaatgtagcctagttagcttgctcccttctgatcacaagacatggcttaggaacacatcccatagggacagaacattgggtgggcccccaacagggacagggacacattcagctctattcctgcttttggtgagagtgacatcacagcttttagcccacactgagtacagggccagggagcctgttgaaataggtcacttttatttgtttttatattttcatttttttctcttttcttaggaaaataactcatctggcagcctctccttcagggctgattgtatctctgaagcaaggaaattcttagtcaggccagaagactagaccagcagagcaagggctgaggggatgtggctctaggctccatcccagatccagacagtgtgacttcagacaggacaggtgtccttggctgctgactatgccagtccttgtgctgtggtccccttgggtcctgctggctctatagggttatgccatgaatccgcaggagctcagcacagtggctttctttcaccgaccttcagggcggtgtgtggctcagtggtttgcccagtgtgctaaggatccatggttccagcaccactgacacaaagactttcaaaaatgttatacgtaaaaatgcctgttgatctttgtacctctggaaaacccaaagaaacaaagagaagaaaacaccaataattccactacccagtgacaaggtctgtggacattctgacaccattttgtcccattggcttctctccagttcatttcgaaccatggctgaggtcagactacaggtgccctatcatagcctgcttttagtccggggtggagggcgagagccctcgcctggcccaggcttccattcccagcactgtaaatgtgtcatgacagtggtactcttctttatgcaccaaatgcaagggttgttttccgagatacactttgaaaacacagaactgcagctcagtggcagagtgtttgtttattatgagctagatcttcgtacagagggaaatagagatgcaggagaggactcttttgtgatcattttttggtgccctaagcagcctatgctgacaacggaggcctcttttccctctttttttttttttttttttttccgagacagggtttctctgtgtagccctggctatcctggaactcactctgtagaccagactggcctggaactcagaaatctgcctgcctctgcctcctgagtgctgggatcaaaggagtgcgccaccatgccctgctcctctcttttccctcttagtgtgtgcatctgcacacacaggcactgtctatacctgcagtttcacactcacagatccaacagccacagggcaaaaacattcagagaaaaaaaaatacattgcatctgacctggcaatgtacagacctcttctctcgtacttatttcctaaacagtagggctctggaagtcactgcattaccattttgttagtgtaaaatgccagagatcgccagcatgcggagagaaaggtgtgtagggtcccggcgttgtaagcttcagcctgtactcagccagcccgttgctatatattatggtgggaacaaggagtggccagatgttgcacttaagtcaaagaagcaaaggaaagagggcaaagagcagtgatgtcactgtcccctccaagggtctagcctaataacaacaaggacctcctactagaccccactcccaagggtccatcatagccccgaaccaccacaggctgaggtccaagcttctgccacgtgggatgcagtctggcctcaagcggaactgttgagtcagccaggattacttgcgtttctttagctttctcattacagaccagtggcatcatttgtgatggccgtgtcatgtgcccttccacgatggctggcacataacttccctacacccactgaggaacgtggctgttcccattttccctttatgcctggttgtcttttaaaatagcttattttaaaagagctattctttctctgaagcaagcttcctctgatgtgcccttcaggaagcttgctacatcccatggtagacaagagcctctcttccctgagtgaggtaacccagtcacaaaagaacacacacggtatgagctcactgataagtggatattagcccagaagtttggaatacccaagatagaattcacagaccacatgaagctcaagaaggaggaagaccacagtctttttcttggctactttgatccttcttagaagggggaacaaaatacattggaggaaatacagagacaaagtttggggcagaaactgaaggaaaggccattcagtaactgtcgcacctggggatccatcccatatacagttaccaaacccagacactattgtggatgcttgctaacgggagtctgatatagctgtcttctgagaggctctgccaatgcctgacaaatacagaggtggaaactcatagccatccattggactgagcacagggtccccaacggaggagctagagaaagtacccaagggactgaagggttttgcagccccataggaggaacaacaatatgaaccaaccagtatctccagggctcccagggactaaacctccaaccaaagagtacagaaagagggactcaaggcttcagttgcatctgtgttccatgagtggagaggcccttggacttgtgaagactcgatgccccagtgtaggggaatgctaggacagggaagcaggagtgggtgggtcagtgagcaagggtaggggggatgggataggagggttttcagagggaaaatgaggaaaggggataaaacttgcaatgtaaacaaagaaagaaaacatctaataagaaaaatgagcctttcttcctgcatatactgggaccatctcatggaacacagtagtgcagcctgctcattgttacagtgcagaagctgagccacagtagggctacagagccatgctggagtcagccatggggtcagggtgggacacagtcttctcgtgtgagctaaagaacctcattaagaggcctgtgctcctgcaggttacagcttggctcttcccatgatgccccctggtgcttaggcaggagcatggggcctggtagttatagacactgagtaatggaaggtgtggatgaaagacagattataaagaagaaatgaatgcctggatccagagtgtgaggcaccacttgccacatgctgcgctcagacgctgcgctgagcgcttgccacacctaccacctctgcgatccacacactcttccactgaaagttcaatgattgtcacctcatatgtcagaaacaaatgtatggaggcattgagggtaatgagtacctaagccacggtcacactggggaaaggcacagtcaggatccaggtgaccagcgtagccaacccatccctcttaccccacagccttcatttggccttgcatgtagctgagtcatgctggattctgcatccttggctggtctagcccctgctgcttcttagctcttccttcatcctctccagccttaggcagtggtggagggtgctgtcactctgggggtgggtgggactgttttgggtgctgtgactgtgaaggagtggaacgattttgagcactgtgactctgaggtgggtgcactgtttgggggtgctgtgtttctagggggaatgtgaagtagttttgagcactgagactctgaggggatgggactgtttggggcactgtgggtctggtgagggtgggactgttttggttgctgtgactgtgttggggaactgtttggggtactgtgactcatagccaagcaacccccttctcccctactggttgacttcccatgtagcctgggtttcctgggcatcgtgttcatggagggcaaatggggcctctgtagaagcgggctgctccccactctacatgggtgtgggtaactgctctctttgtccctcacagtggtcgggcttgacatccaagatgagatgggcagacacgaagtgggccacatcgacaattccatgaagatcccgctgaataatggagccggctgccgcttcgagggccagttcagcatcaacaaggtacggagggaggcactgcctgggcccttttcctgccccctgcccactcgaccctaacagagtcagcacatgactgccgagaattttcctgagactgggtaggctctgcattccctgagattctagagcctctgatggtgggttcagaaagagctgcccctcgctggagtggaaattaccaagggaggtgagacctggcttcaagtcctcttcctcctcagcaagcagtggccacaggacattggggtttacagctgcgatgacagcaatgccacagtggcatccaccacggcacaaagcccacgggtgcaaatgagagagcacactgttcattccaggcctgtatacgcaccttgcatcagagtcagatctaggctccgtccggcaacactgtggacaggtgagcgagtgaggtcccaaggcaggtggcgatagacagccagaacatgccatcactgccttacatctgccgatcagctcagtgtaggttgtccccttggtgggctacatggggatggaccagaggaggccaagagctgaagtggaaagggatatagagtcagcaggtcttcctataggagtgagcactggacagcagtgtgggaagtcataggtttaggctgcagccacccccagtggggaccaccaacaaggacccccaacagcatcgccttggaagtgccagggaggcagaaccttgggctctacctccagcatcctgaaatgctcccaagactgcagtcaccaaactctaaggatgtcaagactcctaaggagagtgtggagccatattataaacgtgggatccattaaacccctgagagattgatctgcagacaccccaaagaatgtacgtaagccccatctttgtttttaactaggctctaactcttttttttttttttaaattatatgaggtgtcttcagacacaccagaagagggcatcagattccattacagatggttgtgagccaccatgtggttgctgggaattgaactcaggacctttggaagaacagtcatcactcttaaccgctgagccatctctccagccctaggcactaactcttaatttagcaatttctactttagttaataaaaaaacaaccaaatcattagcaatacttgtggctttgctactagaaactgctggcattcacactacattatagttgtaaagaatttccaggtaccgtgcacacatccccactttgagaatgacagccaccaacacatggctaaacacttgggggaaacgcaccactttgataatagagtcagacagtgaagcggatgcttcggtggggctgcaggggaaggcgtcgtctactgatggtgtttgaagattgcgggcacgtgtctatacgtactcacttcccagtcatgagatgtggttactcgcctttgaacatgcatactcctgacaactcaggcgtcacactacctacctcttagcaaacatgtcctccattcccttgggtgggctgtgttgtggctcgcagatagctctgggtgagccagaatttgccttttcaagtcggatcagcttgtgttcaaaaagcctgactcaggccagggcatctgtggaagggttgtccagtccttgtgctatggccactgttcaatggactcttacctggctcttaaccccaaagcatgggagtcaagtaacattggagagtttagggctaggtctgaacccaggcacttgggccactgggctctgcactctgcatatggctactgctttttaacatgtgtattacacaagctatgactagagtgaccatattctccaggcacagcctggaccactgtccacccaaccctttgcagaatgtggagtcccttctgacatcaccctctctcctttgttggggtcttgtgtctctgaagagttgtcattaagatagcagtgtaacagcctagtatgaggacaaagaggacagctgtccctcccgtctcccatcattagacacagacttgtcccatggtccctttatccaaccatcaggacatcgaccaatagccagatacagagttcgctgcaggtaccctggcagcccccagcagcccagactgagcctgcccagtagcctcactaatcatggctgcccctggagggaaggcaaagggaagggagagtgggggctgactccagctatatatttttaaaatccatcagagacactgacgtaggtgcctaagtcacaggttctaaaagcgtcgccttctgtttctccagctcagcgtgtgctagtgtgactcagacccctgtggtggatttggtgtggagtggagtggattactgagtcacagccttgaagggctggcagcaggcggcaggtacccaggagccagccttctccattctcttaaccctggggacacagaccccaaacccaaggcattctgtacctttggcctggcccactgcccagaaaacctgacaggacaccttcagtctcaggaattatgactgtatcgtgtaaggggtttctttttttcactgcccagtgcctcctccgatgttggaatggatcccaggccttgtgtatgtgagaggcaagatgttcttcctgacgtaaatgtctagcttcatccccactgagctacaccctagccctgtgcagattttgtaatggaaatcagtccaggtactacttacactgtgaaaggaagcgtgaaattgtttttaaaagcagtggcttttcctcacaccctgttgctggcccgcccaaggccctttctcctcaagtactgaagcatgctcatcccgtgtacctgtgtacctcttgccattgcaaaaccctctgtggtcatcatccccattctctgatgggaaaactgaggcacagaatgataactgggcttgagcccaggtgccagatgtggagaatcacttctactgggtccctgagttagaccacactgatgctgtgctcacttgagagaccttcctgggtggccccagactccctgggatgtgtgctacggctgaagccagcctgatactggtggcactgattccctgaggggatggtcacacaccaggctgtagcagtgaccaccccccaccccccgccccagctggttttcagtgtgtcagttgggattttagctccccagcctcacctgcctgcgttttcttcccatgccttccctccaccttgaccagcttctgtttagggctttcctacctctcgggcttgcttctgctgcctgtgctctgaggcctttccttgtacctgaaatagagctgagggtcctccccagcctgagtgtagccctcagcaaggtggggaaagctttgtgggcaggcattttaggaagaagtggcaggcacaaaggcctcaaggcggagctgtgcagggtactattcccagtgcgggaggctgcagggtgctgttcccagcgcgggaggctgcagggtgctgttcccagtgtgggaggctgcagggtgctgttcccagtgcgggaggctgcagggtgctgttcccagtgcgggaggctgcagggtactattcccagtgcgggaggctgcagggtgctgttcccagtgcgggaggctgcagggtactgttcccagtgcgggaggctgcagggtgctgttcccagcgcgggaggctgggggtgagtggagctgagggtgctgttgatgaggccaagggaggtggactgagtgtgaccagtggccagaatacatcacaggagcactactgggtcactcggtttttccgttactctgaaatgctgaggcaatgatgaagacggaaagaacttagacctagaggctgaaagtccaggatgagtccttgtcacttggcctctggtgaggatctctcagtggacaatatcacagtagtggacacgggacagagagggtcctaaaggaagggtggtgtggtgggacaggaagcagagagaggccaggcctggcttcctcttttaaaaatcaacctagggcccatgagaatcacatcggcccctcctgaggtcagtgtccctcggtgacctaaggattaccacccccacctaggcaccaccttgctcatggccacaaccccagcacgttgtgcaataaactcccttcaaagaagagactggtgcccagaagccttgaagggcttagggctgaggtgtggcccaatcaaagatagggtttagtacactttctctcatggccctggggaaggggctgcagggagaggcaagggtgagcagacactgactgggagccagggcagaagccactttgagatcctccacagaaatcttgcgtagggataacaatggcctacaaggccactgtcatcagtttctgacggtggtgatgaggctgactgggtagctgtaagcttagtttagagttcttggaagtcactttggtctcctgactcagagtgcacccctcacccactgctgagccagcaacccggagtctgcagatatgggcagagactgctgtcattttaagtccaggctcagtgtcaggtgcccacatgcgcacttcacatgcgctcttgccctaggttgtcccggatacttctttcagtagctcctgtgagtgtactgttcttcttcaaactcatacagttagaaatgctacgagccagggtcccggtgccggtgtatgtatgactctggtgccccagaccatgcagaccacacagcccttgcagtcagccccccttggacagccacccagatatatgaaacctgcctttctccctccaggttcccggcaacttccatgtgtccacacacagtgccacagcgcagccacagaacccggacatgacacataccatccataaactctcctttggggatacgctacaggtgagcaggggacagggtgacatggccgtgagctggtccctaagagtcatccacatgagatcctctttgtcctgtcttctgaggatgtgcctgtggtggctatggtgtcagtggtgccaccagccacacaacggactgagatgctcagcctgggagggaggtggactccagggtttggctcagtcccttcagagctgcttctgcccgtttcctgttgctgttactgagcagcacagagtaggtgggtgtttagtgaactgaaatctatctaagctagagctctggaggctctgaagtaggagcatagaaccagcacgggactgtggagagggcctctctcttcttgcatccaaacgtggtcaggcccatgatgggcactgacacaaggcccaggcaaggacgcgtcagacacattaccctctctcaggaggcccttctacactacacacaacccttcatttttatattcacagactcttaagctgacattcaggaaaattaataagcatgtatctgtgacccccagaatgacacatgtagacatgaaatatcaaaggtctgagacacctatgagggctgctctcagttggctgaacacccaaagtgatgactgaggaggtggggagcagggaattgggtttgtatggggaaaacctttgcttggttgatgaagaggatgctgacaagtgtggcccctgtacaccaagtgtacacctgccacgaggaagaaggacccacacagcaaggctattggcatggacatgagggaggggctgtaacctgggtaaggagggagaggacctaggctaaggcagtggagagggccgaccagagctcagaagcaaaggacaacagctctgctccacctgagtacacagatattccagctcagagccaacccatgcccatctgatcgcttgaaaaacatttatcaaacatctgctgtgtgccaagtcttgcacatattggtcaggctgagggtgggtcctgctggtctgactcttccagcctacagggcgggcataccatcacatctccatccttggagtcagaaaccaaatcttcacactttcggtccaaggcagcaaatggacagccttccctcccccgcgagtgggttcagcctgagggacaggtcactcacctgctaaagtgttttctctgcaggaacctaccccgtctactgctctgatctccctccctcccgcttccctgaggtcccatgggcctctatcaggcccagtctctgggctcagttctttgcaaggtctgcttatttggcccactttgggcctccctccacatccatgtcaattatccctcctcccggaagcccttgctaactcggtccaatggctgggttgccctttatgaccaaatggcccctggtcagtccccacaagcaaggccaggcttgaaggtgggaacccccaaggaactgtctctcactgtgcttctctgcaggtccagaatgttcacggggctttcaatgctcttgggggagcagacagactcacctccaaccgtgagtatcttagcatggagcaaccccctcccctgcagaagtccccgtccagccggtggcatgggactagggaagccagcggggcagaagtcaggtgcttgctgcaagccaaggtcatagtctcacaccattccttcccccacagctgccctgtatagtacacagactcattcctgtcttttagaaagggaagagggtagcctgtccctagggaaggttgattgtacccccgagctattgccaagctccaacagcatctgctgtccctgctactgaccactgttttgccgttgtcctgagtggaggcagtcacctggatcccacagagcagttacagaaccagaacccactctgtgagaaccagctctgtaggtggccagtgggggaaaccagctggtccctcccctcctgcccaaacccttcctatcaaccattggctccttccaaagtcttagtgccgaatctctacttgccaaagactgcacacacacacacctccattcttacacacacacacacacctccattacacacacacacacacacacacacacacacacccctccattcttacacacacacacacacacacacacacctccattatacacacacacacatacctccattcttacacacacacacacatacctccattacacacacacacatacctccattcttacacacacacacatacctccattacacacacacacacacacacacacacacacacacacacacacacacctccattcttacacatgcccatatgtgcatgttgtgcgtgcatgcacacaatatgctaagaaaaataatgtccactgggtcactttgaagcatcatttatttgtgtcagcccttgtgcgtggtagggacctgcatcttggaatgtgggcagctgttggccatgatggcctcagggctgttaggcagtcagacactgaatgcatattgatcaggcacagtaccaagttctagagacaggaaggtgagtaaatgaagcaagcagcctctgcaggcctccattctgtgctgtcaacttggaagtgttcatgatacctgggcctgaggcagaacccctgtgactccttaaggacatccgtctggcgtgttcctactggggaggaaatgtgaactgattctctgtgcacagtagacataagggtggctctttttttttccttttgtgactacctaatgttttgtacaaatagcaacaacaacaacaaaatagtagagttatgattttcactaaggccttcctttcttcaggttttatccttggagagtgggaatttgagacttgtacttcaaggtgatctttggcctcctggtttaggtatagatgtgagcccatctcatgggagtttccagggatgaagactagaatcggcctttaaccccatgtgaccctagtactctggaccctgagagccattgtgggcatgagcaagaggtgttgggtcccctgtgcttagcttaaaggctccagggctttccccagttttcctgagggtgtgtgttgggggggggggtcacctccatcccaggagtgctgcccttttctgaggagacagcagggccagaactagtcaaggctggaatgcttgctccatgctcaccactcttacagatctgaatctgatctgcagagaccaggattagaacccagaagactaaactcccatgttcttttagctccatggttcctagcccaaggttctagaaggaataagagggatggacattgggcctcattttttgctcgggaaggctgaggcagctctggttagctcatgtttatcagtagctgattgatcccttcatcctttgtccagccatcctgtccactccttcattcagcaggccttgccactgtctgccctgtcccaggctccgtgcagggtttaggggcaggaatgtaagactttgtccttgcactcagcaactttgccatccaggctgggaggagacaggggcgctgggtgaaaaggtcgtgttaaactattacagggctgaagggtcagcagtttattgagaaagagggaagacagtgaccagattctgttgtttgttttggcagtgttgggattgaggccaagggcaggtttatgccaggcaggcgcttgaccccagccctctgggtttgatcagtcttacttagttctttctggagcccagagcccagattattttaaaacttaaaagcagacagacaatacctacaatgaaatggggtctttcttgagtcccacctttctccctggaaaatttctctgtgtgtgagggatggtggggaatgtaattttgccagtctctctctagtctagttaaggatgaaactgaagctgctctgtttcctggggcttctctctagacaattcttggtgaccacgcattaaagaggatgtgttccctggcccctacttcacaggagcgtgctgctcctgggcctgaatctcagagaaaatgccccctcagcacccctcgttaatggctatcccatttgtaagtgtgtggctcagagtattatatattatgtagtgcagatctaacaatcccagcaagccacattctgaagagaaaggggagaggaccctacagtaccaggaggacttgaacttggggttacaggcagagccacctgccaggcagtgcccaccccatctcatcttatgctgtattcctgcagccctggcctcccatgactacatcttgaagattgtacccacagtgtatgaggacaagagcggcaagcagcgctactcctaccagtacacagtggccaacaaggtgagtgggccgtgaacgggctgagcattgcaattgctccctctgctggccaagggcataggcgatgccccgcacattctgctgaagggaatttcagtggggtggacagggagtgtccaggctcattctctagtctgagtaaagatgaaataccagttcttgccgtggtagtggcctcaaggtccaggtgagacactcttaacaaggagataagatgtattctgtttgaagtaggcagaagaccatcccagctctgacattgtctggtcctggtttcttcaggctcctgttgatcagcacatggccgatgctttgcattaggcagggaatcctatcaaggtggctgtggacgtctcaggaccccaacagtccaagagacacacaggtcttctgggaagccaagggacatccaagccaaagaaatgagatggcacagcggttagtggcttgagcctctccagaaagcatggcttgtgccaatggaacataggcacttggagtaggttcccctgtttaccacgaggctcctgtttctgctgttgcagggccacccagacccttagtataaatgatggagtgttcagctcaattaactatcattatggttgaggaactcgccaagctgtgtagttacagtgtaggaattagacccaggttcctcttgggctccagagccccctggttgctcacccactcagtccaaatagggatcgtccaggcttgcccacttggacagcctcttggtcatgggtccctatgctctgattccctttgatccataactctctccgagagacttattgcttacattcactatttcaggccgtgtctgtcctactctctggtggcataacaaaattctaagagcctaagtagtaagtaaagaatagaagtcagccaggcagtggtggcgcacgcctttaatcctagcacttgggaggcagaggcaggtggatttctgaattcaaggccagcctggtctacagagtgagttccaggccagccagggctacacagagaaaccctgtcttgaaccttccccctaccccccccccaaaaagaaaaaagaaaaaaaaagaaagaaaatagaagttaatttatctcatggattgggaaagaggaagtcaaagagatcaaccccagcctgtggtgagccttcttgctgtgttgtccagtggagggcagggcatggagagacacaagcatacaagcttagaagtgctttcctcttcttataggagagctaatgctaccattgacacttacctcgtggcctcatctaacctaatcacctcccagattaccacctccagccaccaccaatgtaggcttacttccgggttcagccccttgatgtacacaaaggacctgtaactttagatggcgaatagccgtggtccccctgccccacatgcacagggctctgggctcagcccagcactgcagcatgcgtatgacttctggggagcatatttcaaccattgtactcattataacctccccccagtgctgccacacatcagcaggaagcagggccctggaccacactgccccatcctagctcagtcatgtgtccttgtttgtaatatgtccatggcagttacttcacaagattgctgtcaaatgaagcaatgttttcagaaagctcccagctcactgggaaggctgggtaattggtacactactgctgctagatttcattctgtctcttaccccctcagcgctgggctgtggcccagacaatcaccctgggaaagctgagtttcctctgctgcaggcttcctccatcaaagctttggcaagggcctggtggctggaccagctcactcagcgttctctgtggctttgcccccagcctgttctgtgaatggaggtggctgtccagtgggttaacactcagtggtgtccatgggatcactccagctgctcaagaccagtgctggggacatgggggttgggcctggggaccccggcatccatctccatttgttgtaaacaagagacgcgagcccaagcctttcaggaccctgaagtgctcaaaccaggtcctgtgggtcatcagctcagatccctgttccttggtggccatttggccaatgctatgtgcatccttacgagccatggcaggttgggcactgtaccttccctgttctctgtgctggccctacttggtggacaagttcacacccacttggttcacctgtcaggcaggctatcttcttattcatggtttagaatgccccttccttagtgagccttccccatccccctgagcagaactggctcacctatggcctgctgagcaccctcctccaccctccctacacggatactgttagaagctagtgatgcgatgatgtcttcatccaccagcctgtgactcctctaggggaggggcttcatcaccccaagaaccttaggacagcggaggcagccagcagaataaatgagcagattccgtgtgactggcaagtcaaggaggaaatgctcagaccgagttcaaagcccactttcctcttccacgtcaccctcagatctgtgctccgttctggctccacttctaagctatgtggtctgtttcccatagttgaagggacccagcgtgctttcactatgctgcctgtccagggcttccagagcagctgagaggaggctgcctggacaccctctgcatcccacaccctcacccacctgaggctggttctgcttgtaacactccttcctcctctctcctgcaggagtacgttgcctacagccacacgggacgcattatccctgccatctggttccgctatgacctcagccccatcacagtcaagtacacagagagaagacaacccctgtacaggttcatcaccacagtaagtacccagggcccagagccagccgtgcagctgctgtcagcccccttgccgaggcaaccctccctcgcctatgcttgctggaagcagatggagcctgctgggccccaggtgagcgcaggtggctttgattctctgacccctgagaagtgttaccagaagcaggctggaacctctggcgtccccctagctggtgtgttgtgggaggtgccacttagtgcaactgatgcctgagggaaatctccactggcttcaggccgctggtgatttttcttctttgtggaaaacgttttttcagcacttggttttttgagacagggtctcactatttcagtcctggctgtccgagaactcattctgtagatcaggctagcctcagattcaacagagatcctgagtagcaggattaaaggtttgcactgcgatggcatgccctttcagcttcttctctgtgtcttctccggccctgccgtcctgggtccagtgtggtccttcttcctgctgcgttctcttcctttgcttttccttctctctgccttgtcttctactctgagcaacagtaggatgtcggttttcttttacacggactctctgtcacatgaacagtttcctggcttccaactcatcacccttgggtccagagctggtgggtcacggtgcctgctccacccaggaggctccagggatccagagtcagcagaggtgacagccaggatggctctctacctgtcagatttggacactgggcctaaagatgtatgtacttctgggaggccttgagcaggggaagcagggtcttactgtgtagcccaggcatagcagcctcctacatggctaggagtgccgctttgcccaactttatacttttaatattggtttgagatcgggggtctcaatcctggctggtacgtttcctgctatggcagagtctgcggtagtcagactcttctagaacagatgggatctatgaagctggtttgattgttgggtcgtcagcagacatggctatatctagtcatgtatctgtcccagactttcagtctgtttgtctttctctatcctggcttccttctcagacagaacttagcaatagacgtttcctatttctctgtaatcccaggccaaaccccagaaaggacaatgttgtccttgttccagctgaggtccttctgtccttctggcttagaaaatggaattctctgcttggtctgggctaggtctcgtatcctctctggaaccagagattgtgaagggggtagcattactggagaggaaactccaggccagtttctgggaggaggatgagcaggcgctgcgaggtgtatggtcagggaggtgtctgtggccaggccattgcttttaaccagcgacataagaataatgatctttgttcttgatacctcccaggcctgtgaggctcagtcagtgtcctggaaggggcaaatgccactaaaaagagcaggtggatacactgagtgtcattatcctggggcttagatacgcctccagtcttcgaccgtcctgtgactgcacgggagtccaaacagtaccgcactggggctggaaggggcatgtctgccacacaactgcatgaggggcagtcagcagcatctacataggaagacctcacagcagcacctagcccctaagtggccaaaaggagccaggctggagctaaggaacattgttcccccggcagacccagtgaacgcctacagttgaacttgaaaaacattgttaagactccctcaagcaatattcaaagtctgcccctcaacacaaaggaggagaggagataaaactagggacctacatgtaggaagaaagttataaaagtttttacctccaaatcaagagatttatgaacaaatgcttctacccaagatcccccgggggagcacatgctaagcacatgtgggcgccggcttttcctattctggtcccaccgcatacccagaataagccagcctctgagatccaagcagatgtcccctgcgcttccaggcaggtgtggcctgtcctcagaggcccggggggctgcactgtcaactgtagcatggacacaccgcactgctaggctgagacggtccctccttgggctccagagcaccagttcccatttgttcatgggaagcagctgagcccctgagcattaaaacctcttggcaagtggctggcaaatgagacagctttggttgctcctttaccgtttgctagaatttgccgtgtgaggtctcagtgaacctgaccttccaggagtttccctgtagtgtggaacatataggaacacagtgctggggctggagattcagctcagtggttaagatcattgactgcttttgcagaggacctgggttcaattcccagcacccacatagaagcttacaactgcctataattccagttctgggatctaacaccttcctctggtctcttgtggacacacatgcacatggcgctgtgtatacatatggccaagtactcctgcatctaaagtaaaaacaacagagagagagagagcactgtgccaggagatccctgctcccaggttccacagcggcagagaggaggccctcacacctcttcagcaaagccctgacataaagggagaagaaggctgtcttggaaagggccttgtgttttcagagacaccaatccagcatgcctttccaaggccaaccagctctctccttgggagagaccctgttaggtcaaggtgagccattgacctttcaagaactggaggttccacaagccacagggaagatctccccccccaacgccccccaacctgtcaaccgtcaccattgggtccacttctgctggaatgaggccccataaatcctcaggcttgctaaccacaccactccatggaacctcctgacattaacttggtttgtttctggaaggcctcaggctgccatcttggttgccatgacaactgtaggggtcagctcctgaaccagctggctcctggcagattgcgtcattgtggagcttcaaagcctcttgtcaagagacagcagatgtgaggatgctgctggctctcagacacactgcacaaagacccctggagcctgtggagggtgggtggtgctgtggcatagtggagacacctgccgcggacttctcttcctcggctcttaataccaaacacttgcgtgcgaagctctaaactccaagtgagtgccctctgcaaatagccctgggtgtgggggggtgcttaggccaagatgtcatgtgacgacttcagaggaagggcagcagctgtggatggcataaggggcagagctttttcacatacctgatacctggctgattctggactcttcagagtcagtctgcagaggacatgccctaccacacccagtaccaggctgcccaaggcttctctctctggacctcacaacacctcagtcaaacctacacctgttaccagagcattcttccccaaaaagaataagccttgcatttggcagtgtgcacgtgcctacatctcccccacccccactcctccatatctgtcccagccccccctcctgctgtcagctgagattgcctgtaagtgggtgtggtgacagattgggtgacttgaggtgtcagatctctgtctttgcatgacttattttatctgagagagggaatacccagaagccttaaggtgacaaattgagttggtgactgtaagagctctcgcccaccagaaagtacagcggctgatggcatgcgccctttgaacgctatcatgcggctgtttcaactgaagagacacttaggggccgccagatgagggaattttgctggagtaagccccacccacttatattcttcccactgtcacgctccccccccacaccttgcttttcttcccaggagaagaatgccccatgccccatgctggagattgtacctcacagctgccagggccagttatagcctctgggtgtcatgattcacttatcagtgtccccagattgcagcacagggcctggcccagactcagtgttcacagatgtgtaagggacagctgcttacggaggtgatagtgactacctttattaagtgcctgccacgtatcaggcaattttgtaattagcccttaaccttcccaggaacctctgagtagattctagtttgtgttttagatatgagttcaactaaggctcagagaagtaaagaaactcttccaagaccacacagctcgtaaatgatgagctgggacttgagccccgtgcccaccaacatcttctcctcaccacatccatcttcacaagcaagggctctcaagagtggcacagccacagaggccctggaagtcatgaccctcttggtacagaagacaccagtgaggtttgccgggacctgcgtctgttgggtgtctgcctgcctttcatagcaagagctgaggaggccggaagagttggttggaaccagcaggactggggcatagctcagtggaagagcgcacacttagcaggcaggaagctggtgtttggcccctagcactgtttggcttagtttcatttggttggtgggtaggtctgaggcattagcttgcttgaaaagagttggggtatggtggtgtgtgtttgcaacctcacagctgggaggcagaaacagctggctcctggggcctcactggccagccggcttgctcagcatgttcccaaccagagagagaccctgtcctaagatagatggctcctaggggtctggcacacgcgtgtgtgcatgtttctgtacacacacacacacacacacacacacggttggggggacagagttttacactcatctaaggttatataagttaagaaagggccactttgctacctggacagggaacagtctcacaccctcctccgaatggctggattctctcctctgcctgcttctcttccctgaaccaagagctacaagtgtgcacaccttggtcccctcccgtaccatcactgtgatgtgcaggacagaacaaaacccaaagcagaagctccatgattcagggctgggatgtgcaggggccttgggatctgtcccatctggggcagctgagtgcaaaggggtcttttggagagctgtgtgcagggcaggtggacggaatggggcagaatgagggggaaggtctcacactcaggtctctaaagtcggttctacagggtgagagggataggaaagcaggcagtgggcaccatgggaggtggggtggggttttcaatgatgcgaagcttctaacctaccaacgtctgtaagcaggggtttcagatatcctgattgcaggatatttgctgtggaaggccctcatagaaaaaccaagaaaacaaatacaataggcttagaagttcaccatatacaaggagatgcactgaagggcgggacaaggtggtctaataggaaaaacaggcctgcaacctctcgaacccaggctcggtgatgcctgctttcttaatggctgcatgaccttggacgagccgtcttctcccctttggcacagtcacagcactgagtgagaaagaaagcagaaggaaacagtgtcccagggcaggctgtcggtgctcaaccaaggtgcagctttgtggtagggtaggaatgggtatttcagttaagcgccctttccctcagactgccctccagttagggaccgaggataagaggtctagaggacatgacatgctgagtggtaaccaccgcccctcccctcctcccatccccaaactctcccgagcccaatcatcagcttcccttcccgacggcccccactctgactctgcgacttgggtgttctcatcttcggctccagcctgtctgcctccggcagcatatgctgagactcggttcattatttatttcctctgacggtgccttttccacaagctctgaaacctcactgcctgcctgaggaaagatgcacagttcctggcatttgcagtcacctcaccgccacccctctcgtaggtgagagaaactgaggcccagagatgtaaactagccttcctggccaaaatcacagagctggcttccacccaggagtgtttgccctggcgcctgctttcagtcccttaccagagtggaggtgatacaggctttttcacagcaagccactgaggagtaaacacaggctcagaggaggatgttagtcctggtagaacacgaactccactctctagcccagaccttctgtggcataagcaatcgagggccacggttacaatgtaaagaaatacatcttttaaagttaggctagggtataaactccaggacagaacacttgcctggcatgcttgaggcccaggtgctaaaaaagaaaaaaaatcaaagccaatgaactaggctaggtgaaatgctaactcagcatgtaaagacacccacctcaaggctggtgacctgagtttgatccctctcccccacgtggtggatggagagacctggctcgtgcatattgtcttctgacctccgcgtggtcgccacagtccatgcatctgcatgcacataagtaaatgtaacttaaacatgaattacaaagtgcaatattcaggtcagaggacttcattctggtcagcacagaaggttgggaagctgtaagtctcagaaagaaggtgctagaccagaagagaggtgtgttggtggttagtgctcattaaaattgctgcttctggacacactggggcctgggtagggaggcaggtaagaggcagagtgtccttctctggctcagcagctctcctccctgagccaccacagcgaggtccccttaccctggtcatccctctgtcctgaggcccggtggaggcaaggccacggtcgtaagcactgaagtgtgtatgcgtgctcatagcccttatttcacagcacactgggggtaagaaacatccctccaagccagctgctgatggcaatgactcagagggcagaggtgggaggacctctgagtttgaggctagcctggtctacagagtgagttccaggatagccagggctacacagagaaaccctgtgtttcttggagagagacagacagccacactgatggtggacctaagcctggttctacagactgactgtcttaagcagcaaagtacctcaaggccccaggcagcattgcccaggcttggagacttaaggagccaattagcaaatgcccgctctgtaccaacgaccttctatctcctctcccttggccttgaatataagagagcaagcaatagggttgaccctgtccagacaccaggggctccccgactagggaagtaagaagggtctctgacctaaggaaccaggcccagagggaggctcttcgttgtgaatacgccttgacacgcccctgagacacgtatcctggacaggagttacctgttacagcccaggctgactacagagacccatggccaacatgggtcttgggccacttcgaagtcttcagagaatcttagtatgctattcctacatgatagcttgtcttcctcttaaagtgccaggaggaagggaatggggacagaaggctctaagaagtaatcggtaggattccacacatttttttttcttttctgattaaagtggatctcggtacatagaaagcaccacactcggcaccaaggttggagcctgagatcatttactgagcacctactgagttccaggtacactggaggtctgctctgcagaatgactgtcagtgaagtcagggtgcttttcctgtttatagatgggacagctgaggccctgagagacgtgtgcatggcagccacggctcaagccccaggggatgatttctgtctcctgtgccagccaggaaggcccagactccccagccctcacctccggcctgccctggttagttgtattgaggaacttccactccatctctatagttattcgtttattcatgtggaccttgggccctccctgcaggtcagggcgatgctgagtgtccagtggcctgtcccctctcctggccattcttagcatccctcctgcaccatctctagctttatctcacaactgctgtattcattttttcccatgttgcccaagacatcatcagtggtgaaggaggaccatgacgccctcgtgtggcccacagcttcatttcccatgtaggagccctgaccttctcagaataaaagatgaccaagagtggcagtttccccagtgagtcccagtgtggtatctcctggtgctggtagctgccatgtccctttgtgtgtcaattccaggatactccatgcttcaagccccttgcttgtgcctgtgactgtcacccacctcactctagttaggattaaggatggggatgagatcaacaatgtccttagggcttgtttccatagctacagtgtgaacatactgaaagggaattgtctgacataaatggttcgtagatcttaaataatattactataatcatactatttctattttattatcctttgtcttttattgtgcctagtttgaaaactaaggaattagtactactattttaaaagtgtacatttaaatattaagtttgaagctaactagttctgtacaccaggctgagggagcactgtagtgaaagcaagggtgggcccctagaatctcctcagcacttcagatgcccccgagctctatcaagattcctgtcttccttgcagcccacagaatctagtccttcagacacgccacaggagtgggttagctgacatcaggaggtaaacctggagggttactgcagcatccctggagcctccaggctgacagtgacttacactgggatggggctctggcatagcttacatgctccctcagtttccccaaaggccgcatcttcttgtgggcctcagtcatgggtcatctccctctaacctgggccagcccagtgaaagcagaccttaagacggtgccaggcttgtgtgagtcataggaacccaggctccgagttgtgtgtggatgaaggcagatggcagggttattttttattttttgctccattgcactgaagtcacattttcctacccaagctctaaaagcattctgtggtataaaatctgccatcatctgacccacgctaccgaaataaagcagctcactgccgtcattctccctgaaaagtgcctctgtgtcatgcgccaggactggtggggagaggcctggcctgtttaaaaacacttcatcataatccccacagcgtcccccatcctcttagctccctggggggctgctcgggtttctcaggctgttattactggaatgtcagctgctctgcttccaggccatccacacagacctgctctgtcttaggccttcgccgcctccgcttagctcattttacgaaaacaccatttcaaagataaatgccaatgtggcctgctttcctgtcactgtctctgtgtcctctggcttcccaccccttggcatcaattgatccattagggcaccactgccacccagagtcctgtggtggttatgtgtcattgatatctgtctacagatgcatacccagaaagtgtgtgtgtctttaatccctgcatatgagaggcagagacaggtggatctctgagtctgaagccggcttgagctacatactagataatctgggctacccagagaaaccatgtcttaaaaacaaaaaataaaataaatataatatatatgaatgtgtatgtaaggcatacataagttaagttgcaaatggactttcacaatttagctagtacagctgctcctccatgtgtgtcggagttacattccatgttctcatcttaaattgaaaatagcaaaataaaaagtatacttagggcgctgggcatgtaacacatgcctttcatcccaacactttgaaagcagaggcaggggatctctgagttcaaggccagcctggttcacgtagtgagttccaggacagccagagctatgcagaggataccccatttaaatgtgtgtgcgtatgtgtgtgtgtgtatatatacaaacaatatataatttatatattattttatacattaatacattgcaaattaggtataagcatttatataatattttaatgttatatgtaaataaatacatagcaatataatattatgtatttagtaatataatattgttagtataatattttatataattatatggtataaatatttaatatacataaattataatttttagaacatatgatatatttatatgggctgcagagatatctgggtaggtaaagtaattgccctgtaaatgagggatccagagttcaaatccctagagcccatgtaaagctaggctcagtaacacacgcatctgtaatcagtggtagaatgggaagcagagacaggagaacccctggaagctctgtctcagacaagaggactaacatccaaggttgtcctctggcctccagatgagctgggtggcatacgtgcatccacaatcttatacacgatgtacacatacacattatacagacacaaaaatgtcttgtaaaagtatagatttaatacaggtggcctacccaacactgtggctttgcccacttacatacattagcctaatcattcatgtatttatatatatatatatatgtgtgtgtgtgtgtgtgtgaatacgtgtgtacacgcgcacacacacatacgaatgaatgaatatcctacaggctgtgctgtggtccagctaggccaacaatggctgtctaccttcagaaaatccaagaatccagtagttattcaatccacaagactggatgtcccagctggtcttcactatatgctggaattctaaagaatgtgttaatgcccatgaaggaatggacttcccagcaagaacaagaacaagcaggcaaaaagagggcttccttcttccatgttctgtatataggctaccagcggaaggtgtggcccagattaaaggtgggtcttcccacttcaaatgatttaattaagaaaaaaaatccctcacagatgtagtcaagttgacaaccaacaatagccatcacacctgtagttggtcagaggcactgaataggaggtctgttttgcagtgaaatgtaagaacgtggccttcagtttactgaacattgtcctgcagtggagaaatggtggttacagacatgcctttgcaccaccgtaaagctggacaatagtaagtcaaatctgagggggcccaggcagggaagcaaacccttgaagaataagaatgaaaactcttattggtttggtttggtttggcttcatccacctgcatcagactccaaggagtctaatggcagtgctttgttgctggcatgtttaaaacacagtacagtttgggaaaaggtttcaggcaacaaccagtccaattccaggggcccataaagctttaggtgtggctgcatagaagctcctttgtgaagtacatgtgaccacgagggtggcttctatagctaaaaaggcctagaatctagtgtggtctctgatagattgcatagaggtaagcaggctattaggcacatgtggcatctcccctaaggttaggtttaactgggagctagggataaagggctagggagggaaagtctgggataatcgttctgggagatttggatgaggctgctgccacagatagcacaaaggtcattaatgatacctgtgcccatccctctgggcaggaaaacaggtattttattggagagaggcccctgtgtgtttaacattcccggttctctagtgctctgtgggcacaaggacctccatgatcccaacacaaatcaaaggctttatgctattcatttagatggggcatttcttacggaagaggcagtcaagttaagagcaaagactcagctgggtatagtagtgcatgcctgtgatccgggaacttgggagatagagatgagagactcagaagtttgtggtcatcctggtctatatgagtttgaaattagcctgtctcagggaattaagtcgcaaatttacaaaatgagtaagtaaaaaacacgggctctactattttgagtcccagttcagccatttgttgaacatgatttcagccctctaaactactactgttccttagcctcgtgatagacatttaagggggtttgggggtcactagcctggagagatggcacagtggttaagagccactggctgctcttccagaggtcctgagttcaattcccagcacccacattggtagctcacaaccatctgtaatgggatctgatgccctctcctggtgtgcatgaaaacagagcactcatatccatgaaataaataaaggaaaaggactggagagatggttcagcagttaatagcactattcttccagaggtcctaagttcaattccccgcatggtgattcacgaccatctgtaatgggatctaatgccctcctctggagtgtctgaagacagttacagtgtacataatttatacttaaataattcttttttaaaaataaacctttaaaaacacacacatacaccaacatcctatggctcacctggagattctttgaggtcataggtccatgctgtggctgtggagttgggcagctgctgttgccgccaccacctcttcccccctctttcccctcctccagccatccctagcaatggtaatattcacttccaggctacattgaacaatatttggtgtcaacaagagggcaaatctgtacaattctggcatctgccaatgcatggggtaacttgctatgatgaagaactggctggatcctaatgtcaggaacaccactggaagccgccttggtaccctccgaggcaatgaccttgctgtttggagtttgcttgcttactacctatcagcagaggaaatgccagctccaaaggctgagtgtttccagtcctacccacccaggccatttgcctattcagtcacagcagacgctggagctgtcagatccaggctccagtcccagatgacctgtgtacatatgaccttgggggccagaggcaccacatttcagattccccatcatttatctgaaaataggatcataagtagctgggaaacatgtagtagaagttaatactataggcaccaaggtcaacacagacgtgagttcaaatctcagctacttacttagtgagctttgggaagtgacctcacttccctcacctgtgaaatgggtctgataatccccttcctcctgcagaaagttcatctgggaactaaaggagctgacacaggtgataatcgcttttattgttatccagttcatccaacaagtggttcgctttgattccctgagtaccatcagcgacaaggtggcaaacaaaatggtatcgtgggcagcgtgtctgcatgagtgcgcttcttgtaatgcaggagggtgcccgcctgatgcccctcagcactgatgtctgacacactctgttctctcaccctcttgcagatctgtgccatcatcggcggaaccttcactgtcgccggcattctggactcctgtatcttcacagcctcagaagcgtggaagaagatccagctgggcaaaattcactgacgtcctgtccagcccagtgactgaggaccaggaaccctgctagccctgcctctggcgtcctatctccttctgccttctctggcccagtgtgtgtgggaggagggtgatggttatgggtggcaccaggttccccagctacctctctccccatgttttagataaattaacactgcctggagtcacgtgtctctttccctgcagagccccaagaccagggtcaggcatggggaggtactccagggatgccggtgacctctctgggaaggctgtagtctattctctgttagggaataacttagagtacaaacagataagctttcagacaggctttgacaatctttaagcccccatcatttggacatgctaatagcttgatttgtcccccgggcagccaacctgtgctctcagcctcgggaccagactgcccaaaggtactgctgcttggcgctctcagtatggaatggtacttggcagggacacccataggcccggcactgcagctggaacttgcttctgcctcattgcttcatgcccgacctagagcccggggcttgtctcctaccccagccctgcctcctcctccgggcagatgccagattgcttgacagaacggtggagactcggatttgcccaccagtcctgaggcagctcacgggtgccccttcctctcttgtctttgcttttctgaatcccccaccaatgtgcctcagctgctgtgctatgcggcaatagcatttcttggtgaaggggctggttcccattgcaaagcccccctccccccaacagttacattctgcagtgccaagggatagggccatgtgactggaaggtcatccttggaagaccatataaggcacagtttgtacacttctgtccaaaccagaagcatccttcccaatgaaccacaaatgatcatgtctgacatccacctttggtcccaaggccttagctggggaaatgaagcaggcttctctttccatccctaccttgcagggtcccaaaagatgcccagcatctggaacccacttgctattgagaccccctgttagctgagcacatgccaactcattcttagacccagggggctcccgtgtctcccccacttcctcctgagttagatctctttcttgttccccctcatccttcctaaggggaggggcagtggtctaggtatgaattccatgcagagaattttagctatgttctcaagtccagagagagccgcgggcctgggcttcatttatattgagatggtttgcatacttttgtaatgaaggggtacctgcagtaggaagttttggggttttttgtttttgtttggttttggttttgtttttcttaaatagtctcttatgggtagctggattctctgccatttgtaatttttcctctgattccaattagcaaaacttccctttttatatgagttgattcttattgtgtatgtaaactgcccctggccacttggctagatttcttatcttcttttaaacattctgttccacagtttaagaaaccagtccctttggtgtgtgaatctgtcacctgtggagggttgggcagggtgggatgggacgggaactatgtggcatgcgtatgagttgaaatcccacttttgtgaggacacggtatgccagtttcccatggaagagacgcctctggcctgttgttcttgtaaaggtattcttaaggggacatatgttttgattctttcccactcactgggttcaattagatattaaaaggctgcttttcagaaatattgctgtgactctgccttgatggtggctgggtagcccagagtctagggtgggagtgagagtgaaatttaattctacagaaagaacagcggttgacagtgctgaagagagccaggtgatggcacacgcctttgatctgccttaagctcataggaggcttagccaggcagatctctttgagttcaaggtcagcctgatctacagagtgagttccaggacaaagcagagaaaacctgtcaagaaaaacaagaataataaagccaggtgtggtggcacatgcctttaatcccagtactcaggaggcagaggcaagaggatctatgtgagttcaaagacaacctggtctacagagagaagccctgtaaagggaggacgagcaggaggagcaggaggagggggaggagagaaggtctgccgagaaccaagaaaatcttgcaggatatggttacaaaccattgaccttgaagagcctagttggctttatcccagtcagattatatatgtagagagttgtggaagcttctagagagaggatttcttctaatcaagtttaactatgggtaccttagggggagatcaccctgggaggaggggagcctgatgtgactgagccacgggtgaggcacccaggctggcagtccgttcacccatagaacactagttttactaaagtgtttgctaaaaacaaaagaaccatttcccgtttgtcctcaagcagtagcgtttccagaaattttgagagatctaccctgggatgccacctgtctggaacacagaccaccaagggactttctccgtggatgctccttggaactggatccatgaactgacaaatgtatttgaagttgacatagaacatggaagactgaatcctagccaggggccctgggctgcagtgcttctaagaggcagtggtgaaggggcatcccagggagaggttcaagtgctaggcgagatgggtgtcatcatggaggaaacctgggaagaagggaagtgtaacaggactcagaggaaggaggaagaggggaggtcagtcacggtaagttgcttttatttactagaaacaatgacaggccattagaggtctaaagccttttttaagagaaaaatttgggggtggaggggatggctcatcagggaaaggaacttgctactgtagccgtctttgctactttgtgggttcttttccccaccctttatccccccagtttcccctgctatcactacataggaaaggatagcagggggagacaaagagagatctcaatctatttttttcttgttcctcctttaagcaggactactaacaaagtgcagccaaccccccacaccccactcctgtacaaccaccaaccacctgcactgcctcttggggccctggcatttatacaccttctgaaaagttcccagaattctaaatatcacacaatcgccgaaaccatttgcagccagcaaaaccgtgcctctgctagagcacgaggcaaatcatagctgcttcggacagtcagaagcagcctcgcatcccacatcccccagctgagattaaagtgaaagcacgttcttttatttttgtgttcttaaagaaaccaaaattgtcactacagctaccagtcctgatgacccacatgatggaagaattagccccctcgttgccatggtatataatgtatgaatgtatatacacacaagtaaatacagaaatgaaaaatatttaagggccagtgagatagctggtgtatacgatgacctgagttcaatcccagaacccatgtaaagttggaaggagagagtatgtgtgtgcttccgtatgtgtgccatgacgcttgatcaccctcccatataataataaataaaatttatctttaaaaaattattttaaaacttgttttcgggctcgaggtgtagctcggtgttacaggcctccccccacccccagcacaaagcaacctggtgcatgcttctcgaaggttcgttatctgaagatagacatggtatcgtgcgaatgtgaatgggaactcatgagggagggcattctccgaagaccccttttcctccccgcagctgctccctgccagttctttgctggtgaggtcatgcatttcattccaacccatcactgggaggacttggcattctcggcatgccaggaagaaacagaggcgtaatcacaccctggccacacagctagcaggtggtaaagttgaaattccaacccagatcggcctgactaccgggttctgaggaagcacggggcggggggggggggggcgggggggcggttggtggttgttcctcagccctaacgtcatctgagcaatgtcaaaacagaaagccaaaacggaggagagtcagagcaagagggccttttgtctcttttcttacagttctcatgtggtagtgacctccaaccataaaattgtttttgttgctacttcataattgtaatcttactgttataaattgtaagtgctttcagaagcagagttgccattggggtcgcgacccacaggttgagaaccattgcgttaagccatcctataagaaagtgggaacattacagagtcagaatgcttccacgtctcctatcaaagctctgtgccagctttgtggagatgccgaataatcactacttgattgaacattggaggaaaccagcagcagggacagatctgaatgtacagtagaggaggcaaaataagggagccagagaatggatgaactcactcccatgaagctctgctgtgaggacaactgtgaccctgctgggcacagtcatgctggcacctgcccccaagtctccatagaaacagagagagtgactgatggtaggccccgtggtacaactttaatcacagtagaggcagccgatagcagcctttcccgagcccttctgacctggacacactgacagtgggtggtactccagttgccatggtctctttaaccacagtaggacactttgtccaggtggagccttcctccaaaaatctccaacacaggttgcagaggcgtctagaataaagtactaaaccggcccctgcagtcctcagagctccagtaagactggctttggacaatttatcttccatcttaccaactctgataaactaggactatgtacaggaccagtgtgaagatggctttgggcaagacatcttttctatatctaaaggtctccatttgttaaggaaacattacaaccttgtatctagaatctggcacaaagtaggttttcagtccatgcaccatgaatggatgagtggcagggctagagacgacgaacgaataatactttgcacagaatatcacttgggttcctaagatgaaaacagcagaaaccacaggccctttccctccctcctcactactacagtgctcaggacaggtgcctccttcacagctcaggcaaacccaggaaggaccaagacttcactcccagaggatgcgcagcgtgtctcaatctgacgaacctgcaggtggcgcccgcgctaccagcaatcttccaacagaagagcagagctccggtgcaaggctgaggaggggaaggcaaggacccagaggtgggggggggggggggggtgggcggccatggactcaagacggtgagctggctcttccccaaagctctcactcggtttaaaaaaaaaaaaaaaggtataatacaaaaaatagaaataaacggtagagaaagcacacttcacactgtctcccatcgtggcgcatcgcacctatttccatcaaacaaagctaagggtttacataattgtgattaattttaggagtctgagcgctgagagccagtcctcagcataaaagcctaaatgtgaagagtacgtacggtagatgcaaaggctgacttttggactatcctggagtgagccagcccacacatctgattttcttaggaagattgattagaactgctttgtgccagatgctgtcctgaacactctaggaaacccatttaattctcacgacaacctactgagattatacctactctacagatcagagagttaggactataaaactgacagttcccatgtccagcaagaaagacacacttgggaccaggtatggctttatgagccaagcaagggctaaacaaacaacggaggggttgggggcggggggacatttagggagaacattggttctccctaaaattcttggaaggtgagagaacacttttttaaaagttcagatttgagggatcaggaagtgtaagttagtggtaaggtatgtgtttaatatgttgttataagttcaatctctagcatcaataaattacattttaatttaatttaaagtaatgcagatataaccctgaccttccaccatgtgtttttatagaattgtatgcaataggacccaaatttctgcatatagaacttcttagtaattctgaagaagccagtcagatggcttttgaaaggtgtgtcatggtgtttaaagaatttggacaattacaatcagcctgtcacatgggtagggttcacccaaattaaactagacacaagtagaaaatatttagatttttttaaaagttcatctatactgaatatgtacagatttttttttcttttcatgtcctaagcaatacagtatcaaaactcatacagcctttacagtgtactagttgctatatctagatatgattatgcaggaggacatgcataggatatacatatacatatatatgccaagtgaacattatgatggaatggacttgaatagccatagatggaggttctgtgaccaggatgctgagagcaactgtgcagtatatatctgttaagtttaaaccctgactgaggtacctacttaacatattacagtgcacctggcctccaggttctcccagcacccctcaggatgctttacatggtatggctggcaagccctgccctctaccctgaaatcaagctgtgctgcttccccccagagactcttccctatataatccagacattctggttacccacccttcctttttgtacctttggcctcccgactgctgcacttggttcctctctctcccttcctcttcccctttccatcttcccatggttcagggtcagttctagcctggactcttccagctatgtccgcctctggctatgtctcccttttatctacaataaactttctccttcactgttcctgggagcagtcatgtccttttctttcctttttcatttttctttctttttctttttctttttctttttccatttgaaacccatgtaatttctacagactcctttgtggtgggaaagggggggtgaagtttgggggtgaggtgtttgggaatggagagaaactaaaaagacatcatcaaggaactggggctgcatgtggctcagtgataaaagggttgctgggaaataggaggtgggtcttcgtcttgataaaaataatttttgttaaaatggactcaaaaagaagttgagaaccatcttgtgggctgtaaatctcagctgtggcagccgggaggagagatgtaagaaaaggccaagaaaaggttgcaggctgggcaacggaggtctcagagcagcttgtgcgggtgtggggtaaatgggtgagggaagagctgtcttctgggaataatgcccgaggtgtcatggcaagcaaggtgggcttttagcctagtttactgggcatcctccctttcctttgaaattttacattttaaagaggggcaatttgcagtgcttctctatcttaaaatgggtgtgtcatcaaggaagcaggaggtgggaggccaagcagatttggacagagtccatcctcagtggtatccgagccggctaatgcctgtcgaagtacccaacagatatatcttggttggttggctgatttatgagaaagggtctcatacactccaggccagctcttaacttttgatcctctgggctctccacctccccagtactggaatagtaggaatgagacaccaagccaagctagaaagggtcccaaagccctgggttcggtccccgacacaaaaccagaaactgaagccagagaagcatcgatgagcttctgtttcaggccctacaaagcggttccattaggggctccagcctgaggtcctgcctactccgctacacggagagaacatgccgagactcaactccagccgcagggggcgctgttctgctttcctgaggcaggaagcgcagactcgcgtcccttctgtgcttgagctacaagaaatgtcatttccgggcctgcaatgcacgccaccggaaccggaaccggtgggtagtagtggttccgccaggacccagattgtaggcagttccatcccttggtgacttcggaccgcagcataaacctcaaacaccatctctatgccccctcctacatgctctgaaagaccttgtcttcccggctgtccaagaaactgcggcagaagtagagcgtctgctctatgcccattcgcaaggaccaggtacatccaaaggtcctcgagttctagttactcaagggcgtatagctcatgcacctcgttatcatgaaatcctgcaggagtcacataccccgagacctcagcaaggcggcagagtgactgccgacaagctagaccagagccactacagtgcattgagtcccctttgcccttatcacaagcagactgtctccaggtacagatctgaccattgttttagggaatgaagtgagataaagtgaggggctttgcgtattggatggacatctgatggttgagaggtaaattagtaaaaaatataacgagtgaagtggaaagagtggcgaggccagtgataggcaggccgggctgggcagttccgagtgcgcactgctcttacagagaaactgagtgtagcgcccagcgcccatgtctggcagcgtacaactgcctgtaattccagctgcagggagattccatgccctgggccctatggacactgcagtcatgtgacatacagacgtatacacatcattatacataggcctttaatcccagcactgaggaggcatacaaattaagtttgaggccggcctggtctacacagatccagttccaggatagtcagagctatatagagaggccctgtcttgaaaaaccaatatgaacctgaaaatgtttgccttatataaaggagaacgtcaagagtcttcaggccaccgcaaccttgcaaatcgctctcctttgcaaacaagctggaaaattcatattctcttctttctccacatatccttcctgctactgctctgttcctcatttcatagtccggtttctcaaaagagtcgtctccacctgccaagcatagtgatctatgctttaattcctggcactcaggagataggagcatgagactctctcaggccagcctggtttacagagcaagttccaggacagcaaggagacattgtctcaaaagacagacagacacaaagagagatagacagagagaggactaccctgtgttcccattcactcgtggatgctctccagtctcatccctgtcccagctgcttaggctggggttatcagtaacctgtgtggctaaatccagtggccacattcattggaggtggcaccaccacctccatataagcatgcttatgcttacagttgctggcaacgtctcagactccttttctgggtatttctctcctctgatccctgactcctggagttccaggcctgggtcccatctattatttttctatctatacacatatatagccttctattctccaggcttaagagaagtgctctgtggtagcagtgccccagtttttggatttaatttgagacatggcatcactatttagcttaagttgcggtttctgtttggtaactgtgccctgctgctgagacacgggctcagacttctaaagcactcttggtcctaacattcctgctgcttctaaaatctgattttcttctcagcttctatatcttagtaagtgacatatctcaccagatgtcaagacttgacatgacaactcagccctcacagagtgggatcatctccctgtaatcccgacactcattgtcctattgtgacaaaagcctttgtgtcagcttagcaactcctcatatctccttttctgaacagaaatggtacttgtgtatttcctcgttaactcttttctgcctctcacactttagttctgtgtgccagagagccatcttgtttgctggctgggctcagtccagagcctggcccccaacagagctctgtcaacatctgagtagggaaaaaaaaaatcttattaactagatgaatataaaaggtatggtataaaggactttacaatatatgtttacacatcacctagatgtatatgagttgtgttttcttttagatatgaagaaactaaaagtcaggttaaataatacagaacatgtagctgacgatgacgtcagatttatgatcttcctgagtgctgctggacttacaggcgtgtgctgccatggtagacctctgcagtgccaggacttgtgagttgtaagcaaacccccaccactgctgtcttcactcccagacgcagggtaattttgtggttgtggtgctggtctgacctgagacatcaggcaaccaaggaacaagtatacagcacaaaaaaaaagctagctctggctgccaagactgttttgttcagaagtttatatgttcagcccacgtgttcctgacagcttcctccgtgtgctgtgctgtcctaggtggtttgagaatcctacaaaggttagcaggtcagcagggtagtcctagtgtacagaaaccagtaagtcatctacatcaatcgggtacagcataagaaggccaagggcacagctgtctacgtggacacccaacccagtaaggttgggttgacatggctgggtgcacatgtcagagctttctgaacaggtggtcatgtccaagcaggcgtagtggcatcaacaagggactacagcagcagtttgcaacctgtgggtcaagatcccacaggggttcatatcagatagaaatatgaccattcataagaaaagagttatgaagtggcagtgaaataatttaatggctggggtctccactacatgagaaactgttacagggtcgcggcatttgaaaggttgagaaccactgttttcgaggtgcttctgtcttgccattcttgatgatgctgtacccccaagtggatggcaagagggcccacaaattctaagtaccactcgttcactaagaagagtcccgagagagaacagggcagagctctcttcctgggcctccccactcagctaagaagcgctgttcacctgttcactctcatttcacatgctggagaagctttcttctctgagcgtcagctctataaactgcatggttagggtctcctcttcttagttcctgaactgttatccagtagctggtgagaatccagatttttttttccctaagtatcttgccagccagcgctgtaagcaacgtttccatcccttcaccgagctgtggaaacctcagagaatccagggtctcgaggctggctggcagggggaacccaagagaagggccactgctcaagattatggagatttacattcctcccacttacagctctgtgtcgtctcctaacaggcgattgagctttaggagagatgcgaaacacggtcgccctgggaagtcattctttgatcagaatgcattaaacagattttattcctttgcatgctgcagtggaacacggggccttgagtatgtcagacacacgctggaccgcctaactccacctcctgttctccctggatgcaaagcaacaactgataggcatggaggcacacaccgttaacgttaacacccaggcagaggctggtggagctttgagttcaaggtcaacctgagagacagtatctcaaaaaaaaaaaaaaggttaaaagcaagaagtattcttttttgttttgcttacttttaaatcaattactgtgatttttacattaggtctcactatgtaaccctagctggttggtcttgaagtcg

SEQ ID NO: 157 - DNA, 2683 bp, Mus musculus
cacgcggcgctgcggcccgcctggcctgcaacgctcccaccggctcggcggcacgatgccctttgacttcaggaggtttgacatctacaggaaggtgcccaaggacctcacacagccgacatatactggtgccattatctccatctgctgctgcctcttcatcctcttcctcttcctgtcggagctcactggattcatcacaacagaagtggtgaatgagctctacgtcgatgacccagacaaggacagcggaggcaaaattgacgtcagtctcaacatcagtttacccaatttgcactgtgaattggtcgggcttgacatccaagatgagatgggcagacacgaagtgggccacatcgacaattccatgaagatcccgctgaataatggagccggctgccgcttcgagggccagttcagcatcaacaaggttcccggcaacttccatgtgtccacacacagtgccacagcgcagccacagaacccggacatgacacataccatccataaactctcctttggggatacgctacaggtccagaatgttcacggggctttcaatgctcttgggggagcagacagactcacctccaaccccctggcctcccatgactacatcttgaagattgtacccacagtgtatgaggacaagagcggcaagcagcgctactcctaccagtacacagtggccaacaaggagtacgttgcctacagccacacgggacgcattatccctgccatctggttccgctatgacctcagccccatcacagtcaagtacacagagagaagacaacccctgtacaggttcatcaccacaatctgtgccatcatcggcggaaccttcactgtcgccggcattctggactcctgtatcttcacagcctcagaagcgtggaagaagatccagctgggcaaaattcactgacgtcctgtccagcccagtgactgaggaccaggaaccctgctagccctgcctctggcgtcctatctccttctgccttctctggcccagtgtgtgtgggaggagggtgatggttatgggtggcaccaggttccccagctacctctctccccatgttttagataaattaacactgcctggagtcacgtgtctctttccctgcagagccccaagaccagggtcaggcatggggaggtactccagggatgccggtgacctctctgggaaggctgtagtctattctctgttagggaataacttagagtacaaacagataagctttcagacaggctttgacaatctttaagcccccatcatttggacatgctaatagcttgatttgtcccccgggcagccaacctgtgctctcagcctcgggaccagactgcccaaaggtactgctgcttggcgctctcagtatggaatggtacttggcagggacacccataggcccggcactgcagctggaacttgcttctgcctcattgcttcatgcccgacctagagcccggggcttgtctcctaccccagccctgcctcctcctccgggcagatgccagattgcttgacagaacggtggagactcggatttgcccaccagtcctgaggcagctcacgggtgccccttcctctcttgtctttgcttttctgaatcccccaccaatgtgcctcagctgctgtgctatgcggcaatagcatttcttggtgaaggggctggttcccattgcaaagcccccctccccccaacagttacattctgcagtgccaagggatagggccatgtgactggaaggtcatccttggaagaccatataaggcacagtttgtacacttctgtccaaaccagaagcatccttcccaatgaaccacaaatgatcatgtctgacatccacctttggtcccaaggccttagctggggaaatgaagcaggcttctctttccatccctaccttgcagggtcccaaaagatgcccagcatctggaacccacttgctattgagaccccctgttagctgagcacatgccaactcattcttagacccagggggctcccgtgtctcccccacttcctcctgagttagatctctttcttgttccccctcatccttcctaaggggaggggcagtggtctaggtatgaattccatgcagagaattttagctatgttctcaagtccagagagagccgcgggcctgggcttcatttatattgagatggtttgcatacttttgtaatgaaggggtacctgcagtaggaagttttggggttttttgtttttgtttggttttggttttgtttttcttaaatagtctcttatgggtagctggattctctgccatttgtaatttttcctctgattccaattagcaaaacttccctttttatatgagttgattcttattgtgtatgtaaactgcccctggccacttggctagatttcttatcttcttttaaacattctgttccacagtttaagaaaccagtccctttggtgtgtgaatctgtcacctgtggagggttgggcagggtgggatgggacgggaactatgtggcatgcgtatgagttgaaatcccacttttgtgaggacacggtatgccagtttcccatggaagagacgcctctggcctgttgttcttgtaaaggtattcttaaggggacatatgttttgattctttcccactcactgggttcaattagatattaaaaggctgcttttc

SEQ ID NO: 158 - protein, 308 aa, Mus musculus
TRRCGPPGLQRSHRLGGTMPFDFRRFDIYRKVPKDLTQPTYTGAIISICCCLFILFLFLSELTGFITTEVVNELYVDDPDKDSGGKIDVSLNISLPNLHCELVGLDIQDEMGRHEVGHIDNSMKIPLNNGAGCRFEGQFSINKVPGNFHVSTHSATAQPQNPDMTHTIHKLSFGDTLQVQNVHGAFNALGGADRLTSNPLASHDYILKIVPTVYEDKSGKQRYSYQYTVANKEYVAYSHTGRIIPAIWFRYDLSPITVKYTERRQPLYRFITTICAIIGGTFTVAGILDSCIFTASEAWKKIQLGKIH

SEQ ID NO: 159 - DNA, 138627 bp, Homo sapiens
  misc_feature (1)...(138627): n = A,T,C or G
aaaggtcagttctggctgtggtgttggaaacaggctgaaggcgacaacgctgaacacagaaaaccagttgaatagcaatgcctgacccaggtgagatatgatgatggcttatatcaggacagcagtcatgtgaggtgattaaaagggctcagattctggatctgaattttgaaacccagggagactgacatcagagtcagggtctgccacagtttgatgaccctggtaaacctccctagcttgggcggtgaccctgaaagggctgtaccctagaagtaggggtgaaataaacgcaaactagtcctgagcttcaggtcatctgggtaagctagtacatttcagcctctgaacttgaaataaggtgatcctagaatgctgatttgctccaggtgcctggagaaagggatttttaaaaaaatcatcccaggcctaaaattatttttataaatatttttccaaatacagtatttttttttttagcgcataatcgaagataaccagatttcatgaggggaaaatacaccatgaatggtaacaagcagaaatggatctcaaggactccagacatggaaattatcagacactgactgtaatataattatgcttcctatgtttaaggagattaaaagtcatgcctgaaaattctgtaaggagactggaaactatacaaagtaactgtgtcagtcatgtctagtcctgaatatgatggcataatctaggtggttagaggggagtttaactaagcgatgcttttatttttattttcatcattttttgagacaggctctggctcagtcacccaggctggagtgcagttgcatgatcttggctcactgcaacctctgcctcccaggttcgagccattctcatgcctcagccccccaagtagctgggattacaggcatgtgccaccaggcccagctaatttttgtatttttagtagagacagggtttcaccatgttggccaggcaggtctcaaactcctgacctcaagtgatccacccatcttggcctcccaaagtgctgggattacaggcatgagccactgcacctggccagatgcttttaacagaatgaaaagagtatagggaaactacaagagatactctagagctagtaccctggagtaagtaacagtggagtgctattactatcccaaggcctgaaggggaaggagaagaaatggttactggaactaagaagagtggacctaggtgaagagtaccacctggtagaaattatgatgttcactgaaggacacggtcaacctgggtgaccactcagggcagaagctgggcaaatacataccaaaacttcattcttctccttccttccaatctactgcaggtactccccacaggctgaaatcagccagaagccaaaaataaggagccatcaaaacaggtcaagaaacctcccagcacacagaaaagggtgaagaagcagagttattctggagggacaaatagaaggcacctggcacagtgaagtcacatatttgaaaaagaactaaacacaaattccaaaactgggaaatacaatgataaaattaataattcaatggtcaggtttaatagcagattcaatacaaccaaagagagaattagtaaactagaaaacaggtcagaagaaactatgtaaaattaacagagaataaaagcaagatgagagaagagagataacggggcaaagttaatatccacaaataagtagttggtaattttccagggcattgagaaaacatcaatccacagattcaataagtccaatgaacctcaagtctacactcatactcattatagtgaccctgcagagacagagaggagtcagggatgatggtaaggataacaggcaaatggaaactaatggagttgccctggactgagaggaaggaaaatttgggaaatttgaggaattgtctgcctggcccctgtaagcccttgtgtttgagccccctagtccccggatcttctgagtagttctactgcctctagacccattccccactcccactgacttgggcctactccccttctcttctcaggagattgtagcaacctcctctttggcctcccactccagtcccttctccacattggctgccagagtcatgcttctaaaaatggcaaatggttggtggtatgatgtggcctaattgtgggtgatatacttctttcctactgctctggtttctacaaagaaggatttcccctcaatactctgggctcccctcaagccccaccaggtaagatggatgaattctgactggtgagtgtgggactggagtctgacatggtggtgctcagctcttcctttcttcttccttttgggagaagaccacccgcagggagctgcattttgctctcccctccccaagaaggcctgtactttttctttgctttttatgcctcctgtgtgggtctgtctgccaaattctgaggttcaccattaggaagccctctgcagatagaaatcacatttgttcagagcattggcagaaaagagaaactatattgggttccccaaaacccccaaaccaaattattgcaatacatcctaacttaaaatgcttcagggcctctaactgcctactagagaaagttcacatttttaacacagccctcaaagtccttcaccatccagcccctacctctccagcttgatattagcccaggctgcatccatgctgtcctctctcccaccacccatgttatttggatccttacccagtatgtagccagtcccttgaagactactttataaaaggcagactctctttcctaactcacactggggaagtcatatcatgagcagcattatggagaggtccatgtgagaaggactgaagcctccagtcaacagccaagtgagtgagtgtctatccctcacctccagtcatctgcagagtctgtagccttgaccgtgccagaaccacccagctaagctgctgttggattcttgatcctcagacatgggggcataataaatatatgccatggtttaaatccatcacccaaattttatgtattagaaacttaatcccctaattcgtgttgatggtatttggatgtgggggcctctggaaagtaattcggattatataaggccatcagggtggagtccccctgatggtactggtggccttataagaggaagaagaggtcaaactcggtggctcacatctgttaatcctagcactttgggaggccgaggcaggcggatcacctgaggtcgccagtttgagaccagcctggccaacatggtgaaacccccgtctctactaaaaaaaaaagaaaaaggcaaagagaggcctgagctgacatgctcatgccctcttaccatgctatgccctccaccatgttatgagacaggagaaaggtcctcaccagaggcagcccctcagccttgcccttcccacagcccccagaactgtaagaaatatatttattttccttataaattccccagtctgtggtattctgtatagcaacagaaaatggactaagaccttgtgtattgttttaaagttttaaattttgggtaacgtgttttgcagcaatagataactaatgtacccagcctgcttctctccccttgactaacttcttcatcaggtctcagctcagactcttcctcctcccagaagctttcctgactctgtccaagacacctgatggtttagcctcccaatacctccttctctggctgcactgcccagactcttctttagggaaccactcttcttccatctgagtctgtgtgtgtaggatgagggtgactccaccccaggtttgagggcctggctgccagcctaggcctggccaatcagcactctccaaacccctggagccactgtttaggctgtgacctaagccagacccttgggggtcagcccaggagcctttcaggaggtacgggggaagtggtaatctttatctcctggcattgctgagtgggaaaatatcagcctggagctacaggcacacattttgccagcacaaggggaagcctgcctcaagacgaggccagaggaaaacaaagaagaacctggggatgggaagagacagattcctgatgcaattgttgaagtgcctgtatccaactgtgcctgaaatccaaatctacctctggacttttggactttaatttttcttttttctttctttctccctccctccctttcttccttccttccctccttccttccttatctttttcttttttttttttgagtgccatagacagtgtgtgttgcttttagatgatttctgtcactttcagctgaaagagttcagaccaattcatccccacgggtggaatcagggactccctctagactcccagatcctctggtaccacccttgtcactgcacttatcacaaaaaactgcaccagagatacgtgaccctttccctgtccctgatttttttgtgatggtatcacacttttgcttacctcctcccttcttttttgaaatttgaggtatgtcaggttcatttctacatccagagtatctgcctaaaagaggtattcagtgaataatggtataatgaacaaatacaagaaaggatgaatgaatgaacacacgagtgtcttctagttggtcaagagactttaatagagtgagaaaggagagttgtttctccagagacctacctgctatgagatctaagttacactaaagtcctctctgagctgacaaaggattattatttttaaatctctcttcacccagaccacagctgaaccggccgcacccatgggacacaaacccatctcccattacagaaaaacaaatctgacccagccattctctgcttaaaacaacttttggtgatgttttggacgggagtgggtggaagggagtgaacatttggattcagagaacattcggtgttatagaacattcatttgtttattgactgactcattagacaagcaatgaattagcacctactatgtgtgggcactatacatgttactccatcctcacagcaagctctgtcttaggccaatgtatttgttatctgctactgcataaccaattaccctaaacctaggggctaaagcaacaaacatttgttatcacacaggaatccaggtgcaactcagctggctgcctgtggctcagagtctctcacgaggttgcagtcaagctgggggccagggccgtggtcatgtcaagcctccactggagcagaaggatccatttccaaattcattcacagggttgttgtcaggccttagctcaaccttgtccaatgtgtggtctgcaggctgcctgtggccccggatggctttgaatgcatcccaggacagctttgaatccagcccaacacaaattcttgaactttcttaaaacattatgagattttttgtgatttgttttcctcatcagctattgtttgtgttactgtttttttgtttgtttgttttttgagatggagttttgctcttgttgcccaggctggagtgcaatggcgcaatctcagctcactgcaacctccgcctcctgggttcaagccattctcctgcctcagcctcccgagtagctgggattacagacacccaccactacacccggctaattttttgtatttttagtagagacggggtttcaccatgttggtcaggctggtcttgaagtcctgacctcaggtgctcggccatggcctcccaaagtgctgggattacaggcgtgagccaccgcacccagcccgtgttactgtattttatgtgtggcccaagacaatttttctattttttttttttttttttgagacggggtctccctctgtcacccaggctggagtgcagtggctccatctctgctcactgcaacctctgcttctcaggttcaagcaattctcctgcctcagcctcctgagtagctgggattacaggcatgcgccaccatgcctagctaattgtttttgtttttagtagagacggggtttcagcatgttggtcaggctggtctcaaactcctgacctcgtgatccacctgcctctgcctcccaaagtgctgggattacaggcgtaagccaccacgcccggcccctaagacagtttttcttcttccagcgtggcccagggaagctaaaagattggacacccctgccttagaagaatcacttgcaaactcacccacaggggcttttccttagggcacagaagccacacacagaagccagcttatccagggtgactgatccaagagatagcaagagagtgtccaagacagaagtcaccatctcttgataacctaatctcagaagcaacatgctcatcacttctgccatattttgtgcattagaaatgagtccataagtccagcctacacttgaagggaggaaattacacaagggtatgaataccaagaggtgggttaattgggacaatttcagaggctacctgccacaggtaaggtattattatccttcatttcatacctagacacccagctagttaagcaactggtccaggtcacccagcagagagtgatctgagtccaaagtggttttctatttccccaggctggcggggggtgagatggaggaaggcagggagaagttactggtaggaaaaaaaaataatgaggatggagtctctgttatttatctactgctgtgtaactaattacccacaacttaatggcttaaagcaaacatttattatcttatagtttctatggatcaggaattcgggagcagctgagctgggtgtttctcagggtctctcaagaacctgtggttaagctgtgggctggggatgcagctttgaagccctgaccggggctgagccgctacttccaagagagcccactcacatggctgttggtgggaggcctcattcctcaccgaccaggcccctttataatcgtgcttgagcctctttaggacaggcagttggcttccctcagaacgagtgattcaagagtggctaagcagagcctcagtcttttgtgacgtagccacaggagtcataactgtcgtttctgcaatatcctgttgattacacaggataggtcagccctattcattgtgggaggtgattctagaagggcatgggaataccaggagatcagggtcactggaggctggctacctaccacaggcttccacaagattgataatccgaaaacttaacttgtattgttgttccctgctcaaagagacccagagccttcccacgtactgcagacacaatctgattttcttagctccatctcccactggctcttgagtggatggaccatctgggactgacagcctggtctgctcacagacctcaccagtcccacagcggaggcccatgttgatacctcccctcccatccgctgttctgttggtaaggcctgcctccgtgggaaggcctgcctccctgggaagcctctattcaaacttcaacgcatagttagtgcatccccagcatgtgcagggtctggctggatgctaggatatgatggtgataccaccttgtctcagggaactttcctttttttttttaaattatactttaggttctgggatacatgtgcagaacgtgcagttttgtcacacaggcatacacgtgccatttgtgtatggcatcattgtttgtgtacccatcaacccgtcatctacattaggtatttctcctaatgctatccctcccctagccccctaccccccgacaggcccctctcagggaactttcactcagatggggtagtagttactagcgaattaataataacctaatcacacgtcatgcccagttctcccaaggaaacctacaaggtaccatgcgattatgtaataggggactggcctagtccatgagcattggggcagtcaagtagctagccaggctgcataggtgtatcagcattgggtttaggtgtaagtgtctgaaaatacagaataacaatagcttaaataagatagatgtttgtttctcttgggcaggtgtttgaggacaggtattttgccacttagagacaggaactcaggtttttttttttttttttgagacagagtctcactctgtcgcacaggctggagggcagtggtgtgatctgggctcactgcaacctctgcctcccaggttcaggcgattctcctgcctcagcctcctgagtagctgggattacaggcgtgtggcaccacgcccggctaatttttgtatttttagtagagacagggtttcaccacatgttggtcaggctggtctcgaactcctgacctcaggtgatccgcccacctcggcctcccaaagtgctgcaattacaggtgtgagccactgtgcccggcaggaacttaggctctttttgtcttgttgctctgctctgtggtggcctccaccttatggtccaggatggtgacgcctacattcctggcagccagatggagaaagggacacagagggtaaagcagacataccaactatcccagatgccccacaagacacttccctttacttctcaatgccacatctagctacaaaggaagctggggaaatgcaactttcactgtgagcacccacatgcccagccaaaagttgggagctctatccccactcgaaaagagcaatgatagtcaaccctgtcttgcatttactctgtgccaggcatttgctgaccttggatatcatcccaaatgcacacttgattcagtaggtctggcctggggacaagagtctgtcctgtgatggccatgtggctggtctgtggaccacagtttgaggagggaggattcgaggtcaaagatccatcattgcatgtttcctcccacacagggccaacgaatggctgtttggaagcagtggctgctcaaggccccttaactctccctgctgtccctaggtttccagttcaggctgagatttccttttctcccccaacagtgtcagaccactgacactgaatgaatgaatgaatgaatgaatgaatgaatgagtgaatgaatgaaaagggaacgcagaggtcaggtcccggcatatgctctaggggaaggctttggttcaccacgtcaccctaccccagaccccgtgctagtgttgtcccttctgaatcctcccggaggaaccagcactgcggttcccctctatttacacagggggaaactgtccattgactctgcttttggaacccgagccctcaccattctcccctgggttttttgaagccctgtcccaccacaaccttggagaaagggccagtgacagaacctgggggaagttcagagtgagtttcccctactcaggtcttgtgtgacctcaactaccatctcctctaatccagcagtcacggaggcagctgctctgtattcctgaggaggaaactgaggctctaagaaggagacaatcggcacagtccacgttggccaagtcacagtgcaggtcccatctgcctctgccacaaccctgcatgttctcgatggacctggttcagagcagatgctctgtgaatgcccactggagtgaacgacaggggcagatggaagcagggacagccactgccagcctcaatagtttcaggtgcctggcactgtgctaagccagtctcctgtttctcagctgatccccaggaaaaccccctcaagtaggtgtcatcgtcctctttgtgcagatatgcaaaaggggcggggcgggggggggcgctctgagaagcccagtggctttcccagagagacacggcaggggcagaggtgagtccaccttaacagcctaggatggccgacctcttcccttcccccacagtattaggccctcactcagagctagacgctgtgcacggccaaagtctgtatcaccccgccccccgcccccaactcaatcacagttcagtgaaactgtttacaaatgcaaaaaactgggctcggagaagcagagaatttgtccgagggcatccaaagagatggagaaggaaatctaagtgggaggcttgaaggaatgagtactggagtctttgggggactcccttcccttccgacagcctcgactctccgccccttccctgcctgcccgcgggcccctttaaccgggtggcggaaggggcggccgggcgggcggcgcccaatgggctgcgcggagcgtcacttcccggcagcgggaggcgagtggcgagtggcgagtggcgagtgtcaggggggcggccggcgggggcggggcggccggaggaggcgttggcagcgggctcggacccacgcggcgccgcggcccgcctggcctgcagcgctcccacccccggcggcggcacgatgccctttgacttcaggaggtgagtgtggcgaccccggccagtcgggagttccctcagcgggcagagggagcgccccggcacgccgcggacccctcccgccctgcatgcaaaagcggctccccgccctgtgcatgcctccgcaggcccctagggaccccaggcgagccccccccctgccgcacacgaagccagccagagccgcggaggccccctcgtgcagcgggagacaaatccacccaccttccctccgccgagccccctccccagcctgcccggataccttgcattcccctcccccacactaggaaacatttcctccctcctcccagatgggaacagcccataacaccccagcatccctctcctccctctactgagcctccttggtggaccccacctcagctgacaggtggggcagggcacctggaatgagtccggaggggcctggggccccatgcagcctgccggcagctggagggttttaagtttctatagcctgaggctcccccaggccgggcagatcgggaggcctgcccccgcccctccctccctcagccccagccctgtccgctgggtatgggggcaccatgggaaggggaggaggcgccttgggcaggactctgcagaagggccaccggggtctggccttggctttctgcagtcaccacaatgggtcctttgtggggtccagctgcctcatggtctaggttgcatggggcattctggaagcctgcgggggaagagatctccaccagaggttcccttgaggtgtggagccccaggggatgtcctggcctgaggcagccacacttggtgtctggctgggaaaagagcagggctttaatgcagggaggagctggattagaatcctggctctgccctttctactgaacagctcggtatattctagaagttaggggcaaaggctctgggttcagaactccctgtcgccgctcggctggctgacctcagcaagtctccgagcgccctcagtttcaccacctgcaaattggggctaaaaataaggtctccgcttgtgacgactgagtgcgtgaaacacccttagcagagtctggcatgatttagagctcagaaatagggcattagtggatggggggtgttctccaggaggggttttccacatccacaaaatagtgattcagatgcctgtgccacaggaggtatttcttcccctcttcttgcatgtgaaggcagtgtaaagtgacagtctacccagagagaaaggcccttagcttgccatgacccccatagcatgggatatattggggtttaggcccaaagaggacactggtcttggacctcttgattggttgacatggttttccagcctgtccgggtccctgataccagctagcaaatgtttgccggcttcttgcccctgccgggcagccctgaggctagcagacctaggcagttttgaacaaggacagcccctctgatggaattcaaggtcagtcctaatagcatcagttaagtctgggccataagagctgtggtcggcacatcaatttctggttccacaaagcctccccttacccaggccaaccatagggattcgtgccaccgccgccccctgcccctgtgtgattcagtaggttccggtgattttgagcttgctggggaaattgctgtttttgatcttttaatcctttctccctgcacctcacccttccgtcttaccaaggaggaaatgaggctccagggatgagggccttatcttggactttatgggtgctaaatgggaagggtagacttaggtctcaggtcacacatggctcccaaccttgtgctccttgaattggtggcttgtgggggcaggtaagggaagtaaggaaaatgggtaaggccagctctagcctttggccttggaagggccctgtgtcaggcattgatatttaaagagagaaatgctcagctctgagaagctggctagtctggggctcccttggcatacttcaggtccctgagtgcccaggtgtcagggggcccagcttaactaggaaatactctcagggcttgggctcactgcggaatggtgagaatggattcagtgcttcacgtttgcaccttggaggatgagccatgtgtgcccagcaaacctgcactctttaagctctgtgaacttcaaggctccaggacctgggttctactgagggttcgaccatccccatgcaccttcctccgcttcagtgtgcattcatcaagcattcatcaagtgtccagtccatgctcagccctctgccacaggccccaccgtgaggaggtgggtggcatgtggtccggctctctttgcattccaagagaagggaggagggcttatggggtcccaggagtgggggtgtgcgtgaactggcacgcaaggagcatctaccactgtatacacactttggggtgcagacatcgattcccttgtcacctgagagagggagttttaatcttcattttaaatcaaaggagaggggagctccactgagtagaagccctttgctctggccatgcagtgcatgagctggtggatctgggatttgaacttggggctgttagctccaaagccttagatctgggagaaaagggagagattggaggggcccaccatcctgtcagctcttttaagaattgtggggagtggagaggggtataccgtgattagacctcctcccccagttcaaggccagggagaaaaccagccgtcctgctcgtgttccccttcttaaaatcagaagcaggaaaaatagtgcactcttgcccttccctacggatacttctgattttcttactgcctgtagagcctggtgcaactgagttctgtgttttcctgtctgtgaaatgggaatgaggagagtactcaccgaagtagaacagttgagggatgaggcagtgcggaaagcatttagacacagagtaagcgcctcatccattttggccgccatatttatttgtgtcattttatttaagcacccatcatctcctaacacattatataattcacttaattatcatgctgcttctctctccctcccattagtacatgagctcctgagggcaagaagtttttatcaggcttcttcaaggttgcatctccagcacctagaactgtgcttgagccaaactcgatccttggagatgcctcttgaaatctgtcaaggaagccatagacatgacgtgacttgatatgccagcttcagtgggcagattttcagccattagtggagaaatctcccctctccacccttgaatctgccgttcctaggttgtttttggggttaaggaaggaggcagaacgcaggggagggaggctgagctttcaatgatttattgtgtttgctttgctcttgttaaattgtttcactaatggctggctgttgcagttgtggaactagccttgtgacccacatccgtgtgtgttgtttcgagttccggctggcctggggccagtagcacctgctgccttctgcacaccagcccagggtgggtgaggagggaagataacagcatccggaagccctgtgcccaggcccagtggtgcctgagcactgccttccgggaggtgcaggtggctgctgtcccacagtgacagcccccatgttgaaaacccaaggcctcgggggtgccgctgcactggcactgaccagatgtgctctgggaccattgacttcccctctcggagcctccatttcttcattttaaggaggggatgtaaacttcgctgcctcacctggtagagtagatgtaggggcaagtgtgatcaatgcacacttgcaggatcaatgtgcaatgcaacttgcaatgcaggatgaggcccataatttgtggggcccagtgcaaaatgaaaatgtggagtcccttgttgaaaaagtattaagaatttcaggacggcagcagcagcgcattcagccaagcatggacccccctctgagtgtgtgaccctgtgtgcctgcacaggtcatgcggccctgatggggctggccctgctgcagggccttggtttggcctctaccatttttcactctggccttctgagtggtctttctccctccaggataccccagacctcctcaggactccctagtgagctttccaaagttgatctgatattttcatgtcctgatttcaaccttcaaatgggtctcattgctctaaggatccagtgtgaattcctttttaaaaaaaaattatatagagatggggtcttgctatgttggccaggttgttcttgaactcctggcctcaagtcatcctccttccttggcctcccaaagtgctaagatcacaggcatgagccactgcacctggcccagtcttaattccttaggccccaatagggaatgggaccctggtagccccatcagttcctacaccaagctaagcctcagccaccacagggacctctgagcacagagttaacattcagcagagagtagctaacatgaatgcctgtatttctaccctgctgtttcttccagaaagaattccaaggaagctgacaagaacatatactttacagcaagttttaaaaaatataaaatgagcgctgtggctcatgcctgtaatcccagcactttgggaggctgaggtgggcggattacctgaggtcaggagtttgagaccagcctggccaacatggtgaaaccccgtctctaataaaaatacaaaaatcagccgggcttgatggtacatacctgtaatcccagctcctcgggaggctgaggcaggagaattgcttgagcccgggagacggaggttgcagtgaactgagaatcttgccactgtactccagcctggccaacagagcgagactctgtctcaaaaaaaaaaaaaaaaaaaagtatatatatatatgggccaggtgtggtagctcacacctgtaatcccagtactttgggaggccgaagtgggaggattgcttgaggattgcaggagttcaagaccaagctggtcaacatagcaagaccccagaccccatctctatggggaaaaaaaaatggccaggtgtggtgatgtgcgtctgtggtcccagcttcttgggaggctgaggtggaaggatctcttgagcccaggaggtggaggcttcagtgagccatgttcatgccattgcattccacactgggtaacagagcaagaccctatctcaaaacacacacacacatacacacacacacacatacacacacatacacatacacatatagccttaaaaatcagggcaaaaagaaaataaaaattagaccagagagaaaattatgtgaaaaggccagtatttcgggtttattgaacatttgctagtgccaggcactgttgtaaggatcttactgtatcagcccctttaattctccacagtcctacaagggaggtgctgttgttaccccactttacaggtgagccagtggaggtgccacagagttcggaaacacggtcgttcccgttcctggagctgggattggaacactgccatttggcaccagagctccactgtgtcctgtaggctcatctctaaagctttctcttttccattcactaaattcagagagaactgagaactcttctaattggattcattgggtttctcttcactaatcctcacccaacagtgctcattaagaagcttaaagccatcaacttttttccccctagcctcatgtagcgtgatacctgattctgaaatggtctttaaagaccctcacaccagctaatggcatcaccctcgaggggctcagttttcccacgctgaccagtgggggttttccagcttagagcatcatgtttacctgctcgcggggacatggaatgagatggaatgtcctctcctcccaaggccgtttggattcctgactgtggtgctgtagtagcaggagacagggctttagccagctgtgtcctggttaagttacattccccatctggtaatcctttcgtattttatttggagttactcctagccagtttttgtcaggcgtgggagagacaggcagggtgtgaagagggtatttggggtgaggcttacccggtacatctaaatcagtgagcctcaaccctggctgtatattaaagtctctcatgtgattctaatgcacagccaagacggaggagaagtgctctgaattgggagaagcaatagcaagcagggctgagagcagcaggggagccaggtcgggtggcggtggagagccttgcctcgggaggctggggcgtggagttcccgtcccacccatcactcctgcatgaccttcggcaactctgttaccccaccagtgaagtggacagtaaggggccgtaactttctactaataaccttgctcttcaaagtgcagtcccagatgccagcttcagcagcaccttggagcttgttggaagtggagaatctcagtgcccacctggaatctgaatttgtattttaacaagatccccaggtgattcatgtattcattaaaatgtataaagccctggtctgtatgattgatttgactcagtgtcctccagtctgtgtccctccatgccgcactggctgcctcactgaggactctgaagagtccggcactgagcgaaccagagttatttggttcagcccagcatttgccacatgtatagtctcagatgccctgttgtttatggagcagctagtaccatttctcaaaacacagtttgggaaacacagccctaattgatcctttaaggaagtggcaattagcctaattgtctgttgtcagctttaacttttaggtctattaacttaattacattgattgtatatgtgggaaaagtacaggacaggaaaaaaacctccaacgctggctgtctttgtttaaaaaaaatcttgacccacgggagaggcagggtgaactcagggttctccatacagccaagagccaggggacatgtggggtcctttacagatacctcttctccctctgagtgggcatgatccttcctgttttatgtccagggaaaccgaccctcagaaatgctgggaaacagctggtgcctctgacagcgtaatcctcatgcccttgacaattagccttcctcctggcacctgccaggcagcacagctacacaggaaggcagatccgcttgaaatggacaaaccattctgtttctccaaaaggtggaaaccctattcgagatgagaggcctggctgtaattacagttagtaaagtcagaggacccggatgtccctgatgtactggggactggcgttgtgatagcccctccatacattagctttcctttctcagattctggtctgggtcttgaatatctttggaggaggagaagtaatgctcatcttattagcaatacctcacggcccttcagcttgtaatgtcttgagcactgggctaggcatgtcattggacttataaaatcacactggccttacagacagatacaatgattcatgatttattttctttgttttatttttaaagttagcatatgataaaattaatgtgtgtttgtgcactcttctatgaaagttaaggcttgtttatcatgtaatcaccaccatccagatacaggacagctccatctctatcacccctcacatctcatgctgtcactttatagtcatactattaatttggttattttttgtgtggtaagaatacctaacatcagagcaccctcttttttgagacggagattccttcttgttgctcaggctggagtgcaatggcgcaatctcggctcactgcaacctccacttcccaggttcaagcaattctgcctcagcctcccaagtagctgggattacaggcatgcaccatcaagcccagctaattttgtatttttagtggagatggggtttcaccatatttgcctattttagatacttcatgtaagtggaatcatgcagtcttcattctgtgtctgccttatttcacataacgtaatgtccaccagtttcatcaatggtgtcacaaatgacagaatttccttttttaaggctgagtaatatttcaaggtgtatatataccaatatttacccattaatagacatttaggttgtttccacatcttggcagttatgaataatgctgcagtgagcatgggagtgcagatgtctctgagatcctgatttcaattcttttggataaataccccaaagtgggaccgctggatcctatggtagctctatttttaatttgttgagaaatcttcttcctgttttccatagtggctgcactatctttcctccccaccaacggtgtacaagcattccctctccccacatcttgccaacatgtcttttgtttttccggtaatagccatcctaacaggtatgaggtgccatttcattgtgatttttatttgcatttccctgatgaatagagattttgagcatcttttcaagatcttggccatttgtatgtcttgtttggagaaatatccattcacattttttgtgctttttaaaattggagggtttttggccaggcatggtgactcacacctgtaatcccagcactttgggaggccaaggtgggtggatcacctgaggtcaggagttcgagaccaacctggccaacatggagaaaccccatctctactaaaaatacaaaaattagctgggcatggtggtatgcgcctgtagtcccagctagttgggaggctgaggcaggagaattgcttgaacctccgggaggcggaggttgcagtgagccgagattgtgccactgcactccagcctgggtgacagagtgaaactccgtctcaaaaattaaataaaataaaatagaagtttatttttgccactgagtttaaggagttgcttatatattctggatattagccccttatcaggtgtatggtttgcaaatgctttcttccattctgtagttgcgttttcactccgttaatgttttctttattcagttttaaaatggtaagccaaggcacagagctggaatgggagtggcccaggacacagctggtgaggtgcagagctggggtcccagagcctggcacctcacatggtgctatcctgctttgctgatttttcttgctgatttttattattcttcactagatcttctctcccctcccactttcacaccaacatatagaattacctaaagtatcctttaagaactttgggaaaccctggtgatatttggcgtgttttgatgtcttgctgggtccaagagtatgttcatggtgtgcagaaagagtctccaagtcttcaggggaaagtggtatgtagcggtccaaccctggccaccctttctgaatggtcttcgcccttgcaaacccctctggggactgaccacaggtcccctgcggaacgctgtgaagtgcccttggaactgaccctcacattgcactcattcggcagaactctctggattgaaatcccttcctcagtgtttaccagctgtggggcccaggacaagacactttgcctctgcaagcctcagttttcctcatctgcaaattggggtgctcatactttctttgcggggattttgtgagggtgagatgagctcatgtggaatgtgagacaagtatacttggaggcgggaggacatttccctctcctctgcctttcctggcggcatagtcctgtgcacctcaccgagccgtgatagatggcagtagtgggtcttctggtaggtggacgtggtaaaaccagggcctccggggtttgcagggcacagatacaatcacatgggaacacctgagatggtcagacccagagttagacccctctccctttgtggtacccacacagccatagacgtcaaacaccagtctgtggtaagggagaaagtggccagagggtcacacactcaggcgcccctacctatcagcaagtacctcagtcggtgattgggcaagatgtgggccatggccacctggagcgcgaggccctgtggggaagggacagctgacatgcagctctgttgcttactgcctacagatgccctgatttttcaagagacaatgaaaatctgataaattgcgtgaaaatggttggccactgatctcaattttatttctgttaaacaccaaacaaatccttctgagggctgacgatagcctatgacaggcagggtgccgcctctgtgtcgcacatggcagtgtgaccaggacaagctcggggtgggcaggaccttgggctcgtgggaggtggcctggtgggcatggacttgaggctggaggcagaggagtgagggacccacaagtcaatttctttgggcacaggcagcctcggggccccatcccatgctaagccccctcccacccggggcctggcctggccctaggaccttgattccttcaggtttcagctggggctcccctcctctgatggtgtgggaatggcaccactggcccctgccattggacctgctgtcctctttggtgatcctagggctggcccaggtccctttggagtgacacaccctttctgcagatccttcaataccttcgtccccggggtgtctttcaggtgacttcccagggctatgctgtgacaacagtagtgcccacaatagtcactgcttatcaagtgctagactaaaggcttttcttggattccctcagtccatcctcaagtcaggtaggagccatttcccattcccatcttcttgaggaggacgcaggggtatagaggggggacaggacttggccgaggtcacacaaacagcaggtgatgccgctaagtcccaagtgcctgtctctgtgccaaagctggctttcttagccagtatcacgccccaggaggggagtgttgttaccctgattttcttgcaacccctccgtggataccccccatctactcagctgtgtttacagtctgttgccttgggggcaacagactgtagaagtggaagccttggggggccctggttgctggagaggaggccgggcctggtgaccatttcctaccagcctgtgcatctgtgggcgagagattatgctgagcccctgccgggggagccaggaaggcgtgcagcacttcctgtgggcagcgggcagggctggtcctcttgccggaggatgctctggccagtccccagggcccctgtccacagaccaggagcagctgggccatagagtcatctgttggttgaacacattgattgagggcctgtgtgccaggtatcattctagaagctggggacatagtgctgagccaaacagacaacccctgccctgcaactcatgatttaaaattcatgttttaattctggtattttgcttctctctctcttttaactaaatacactttttattttggaatagctgagatttacagaaaagctgcaaagctagtacagacaccctacatccattccgcgagggtccccaccttccattaccacattctcaccactaggaaactgacctttgctcatgactattctctaaactctgggctctatttggattttgcccattttccactgatgtcctcatggcaccccaggatcccatcgaaggtcccacatttgcattcagaacctgtgtgtccccaggctcctctgggtgggggcagtttctcggtcggtccctgttttctatgacctcagcagccttgaggaagacaggccaggcatcctgtagaatgtccccagcctgggtttgtctgatgtttcttcctaagtggacagggttatggttttggagaagcatccccagaggtgaagcgcccttctcagcacatcccatgggggtccatggcatccatttgacctctctggcgatgtcggccttcagtacctggttaagtcctcatttgggttggtggtctttctccccctcccccaatcccctgcacccatcattcctgtaaagtgaccctcctggagggaagtggactgactcccagcatctagaatcccttgtgtgatgctacgtgacttaacagcgcctctttctgcgctgtctgtgcaggacgcccagcactgggcactttgagtcacttctgagcccagcagcgtaagatggggcaggagaaggagcttgtaagaacccattgtcctccctggcctgccccttgtgccaggctgatgtcaggtggtttatagtcatgatctcatttcaccatcattacacacctgcatggtaggaggaactgtcttggctctgagttgggagacagcagagctaggattgcagctgatctgggtccccactccacagtctttggattatgccctgtgccctttgtaagaagagccaataagaagggctataggaaccatgtcataagagtaaccttcaaaggaataggaaggtttctcctggcgcaggaaagtgttttaagaggtgagcatgagacttgacccagagtcttttaagtcccttacagtagacagtggtgggcctgtctggagctcattgctgtggattcaggatgtgactcttgactgccgtgaggactaaataagtttgcctctgtaaagcccttagaactgtgcctggcatctgttaggtgcttgatatctattcgttacagaaaaaagcaccaggatatccaggctgtcagagaagatttatggatgggcaggaaattggactagagatgcctcctttgtgttagcctaagtcagctaattcctataaacaacctgcagatctcagtgctgtaatgcaacacacgtttattttttgctcagtgtaacttatgctgggacttgatgactgctcatgaagtcccagcagaagatggggtgctccgctccccctgggtactcagaggccttgactccttgcgtcttctggctctgtcctcctctggggtgtgctggatcctctccttggcctggcagtggtggggagagaaaggaggatggggacaattgggtggcaggtcaagatgtggggccatcacttctgctcacactcctttgtccagaactcagagacctggtcacacctaactgcaggagaggtcagcaaatacagtctagcagtgtgcccagaggaagaggaaagaaagtgctttcatgagcatgttaataagcatgtctctaccatggcaactgaaatcagtggtttttacccttccactattctgctactatcatcataatttttggcagattcctaaacagcatgtgatatatatatatattttttgttgttgttgttgttgagagggagtcttgctctgtcgccaggctggagtgcagtggcatgatctcggctcactgcaacctctgcctcccgggttcaagtgattcttctgcctcagcctcccaagttagctgggactacaggtgcgcgccaccacacccagctaatttttgtatttttagtagagacggggtttcgccgtgttgaccaggatggtctcgatccgttgacctcgtggtccacccgccttggcctcccaaagtgctgggattacaggcatgtgccaccacgcccggccacatgtgttatttacttaatattttttctttgaattaatcaggttttgaacttaacacttttactgatgaaaggtgaccttataacatctttggaaatggaaaagcaatagctcctgctgtaaattgatacaaataattgcaatgtgtttggttctcacgagcatctggtgcctggtgaagttgctgggtttgttaaaaaagagatattagcaagtgctagagagaggagatgttgaagacatagtagtgccaccctgaggctttctcgttgatattctgagcatactcaaaagagagctgaacagggaataacttttttcatggtggggtctgatgtcatttaaccaccagggaagtagggttcattccttttttccctccatcaaaaatttattggagggattctgggggaaaacaagacagacactgtttccaccttcatgatggttccaggctattggggaagatgggcagaacagcagggaacaaatcattgcacaagtggttattttccattgtgatgagtgctgagaaggaaggcaaagtagatggggcgatagagagtttatagagaaggagctcactggattagcttggctaactagtactcttcctcaaaaaagatcttcccagactgcctcttcaacctaacttgggtcatctgccaccccttttctggccgcacctttttatgacacctagacaggtccttcagatcccttggcacaattagcacagttgcagtgatttgtttgtgcagtttgtcatcttgtgtctgtcttccttatggagtctgagtcctcgagagcaggggccatatctatgtgttcatcactggatcctggtgctgagccagcgtctgcacactgtgggtggtcagtaaatattgactgaatgaaggaagtagagagacagggaggaagggtccagctgagaccctcctgcaatgtggcagaggggttcacctccgcaagaatggaggacttcattgctatatccctttgtgtttggaaaatgtttctagttttctcctaagtgcatctgaaagaatttattttgaccgagtcctgaggaattgggaagtcagacattactgaggccctgcctgaaggaggggtgggtggcccactacctatcctgatgggaggccaccacgtgccagctccccttgcttgaagccatgttagtccccagaacaggagtaaggcagccgggagaagacacctgacattccaccttcactcctgcctgggcattaggattcattgtaattattcccattttgaggaaatggagaccgagagaagttgaagacctggctcagggtcatacctctggcaaagtaacaaacccaagccctagctctactttccgacccccagaaagtaatgctttcagttagatcacctaaccctggaaatcttagttgcttgtttttgagttgagcaactgtgctctctctagcaaactggccagtttccctaatcacctggggccctgtgcggatccgggagagtcagattcaggtggcctgggaatctgcattttcaccagtgtcttcagtgattcttagggtcaggcaagctggggagaccctgaataagggttcccccattatgttcccagcgtaactctggaactgggtaccacaaatctttgttaacctagtaatgaccatcacaaaagcgagtgatgggactaagacttcagaaagcccttgaagatgtgtgtgctctagggatcattgttttctctgcagatgaggaagctgaggctttggggggttgagagttgggggtcacacctgcaggaatgcagctcttctgaatttgaatcccttacgttttccagttgatggcaggagtcatatgtgtcttggtgaatgttaggtcctcacatacccccaatgacagcagctgtgggtctcctctctgtcctggtgcatagcacaagacctcacccacgctgtctgcactcaacttgtttctggaaggcagggaggaaggaagctgtcagtgctagacatttgcaggggaacaggggtgggtaggtggtgatagtagaagtaaaaacattcactcagcatctctggggtatcaggagcagtgctacaaactataaatatcatcttcttctgttcttacccatcaagttggggcttttatttgcctcattttacaggtgagagaaccgaggtggcgtgatctgatctagtgttgggtgtgtcaacgtcgtgtgctgattagaattagtaaacacggaagctggaagggtcccaggatgggttcagtgtcgccctgatgtacccaacaagccaggtggcaggagctggttccacctttcgggcctgcctgactttccccaatttggcttccgttggccaagctgcaaaactgggtcacacttgaagccaggtgattggtcagagctgagttaaccctgagtcaaaggagggcatgagaaggttcgcctacccgccccctccctgccccaccccaccccaccctgggccaggcccctcacagtggagccacacaggcacgtcatcctgcttgggcctccgcctgccccacactcaccagagcatgacaagtcagccacccgggatttggctgttctagaggcactgttccatgctgccaggcagacctgggacagctgggctgagggctcgggggagtagagggaggtgggcaccgtgtagtgcggagaggcctagggctttggagtctggtggacctgggtgctgatcctagtgctcccacccactcgctgtgtgtccttgggcagctcacttcacctctctgagtctgttttctgctacaaatggggatacaaccctgaccccaagcagctgctgtgtagagttaacaagagcctcatatagccctaggtcttatttcagtgtcgaacccctcttttcttcctgcatttatgaaatttcctgacacatttggtcttctaaagcggaggttgcaaactggtggcatcagaggttgagttttgcccacaaatgtgattatttggccctcacatttttaaaaaattgaattttatgtcagcatttttgaatgaaaatatttcacataaaaatttggatttccagccgggcacggtggctcacacttgtaatcccagcactttgggaggctgaggtgagcggatcacttgaggccaggagttcgagaccagcctggccaacatggtgaaactccatctctactaaaaatacaaaaaattagccgggcgtgatggcatgtgcatgtaatcccagctactcaggaggcttaggcaggagaatcccttgaacccgggaggtggagcttgcagtgagccgagattgcacaactgcactccagcctgggcaacagagcaagactctgtctcaaaaaaaaaaaaaaaaaaaattaaaaattcaggcacagtggctcacatctgtaaagccagcactttgggaggccgaggcagccggatcacctgaggtcaggagttcaagaccagcctgaccaatatggtgagctcccgtttctactaaaaatacaaaaattagccgggcatggtggcatgcaccagtagtcccagctactcaggaggctgagacaggagattcgcttcaaccccggaggcagaggttgcagtgagctgagattgcgccactgcactccagcctgggtgacagagcaagactccgtttcaataaaaaataaaaaaattggatttccaatgcatctggaaaaatggacctcagtggccacatggcagcccagggctgttgctgggcagacctctgggaccttaaagcgggagatgtgagagccaggatcaggttgcaggcctagacagggaggtgggggggtatggtcacctcaggggcttcaggtgcccgaggacccctctgagacatgaggacagtcttccagtgtgactgacttaattccatctagtgaggaggtggcttttagagtctggatgcccctgggtaaaagggctccacttaccagctccttgggccagtcactgacttgtctgtgccactttctcatttgcaaaacaagagtaatgcgttgttagtaagcaccatggtaagcactccactcatgtcagcagctcatatgagtccatcccaagtaggagatttgcccgagatcgtctttgagagatgtctttctaaaggttcctggagagacaggcctgtgtctggaaatcccaggcagggactctgacggtgatcaggcctctacctgtcaatgggtgaaccagccaaaaggagaccgccaaagcatcaggtgcattgccaggggcattgccatgatttgattgggagggagtgtcagtgttgcattttttgtacccccactttgagccctgtgcttaaagacaccatcaaggccatcccctgatggtcttgggaatggatagagctgaaaagagtgaggcccagaggcagcttttcgttttccaaaacgcaggcagggtctgcccaggtgccctctgtgggcttgttagcctgcaggagctggtttctgctggctgatgttaagtcaaagaggtctcctggctctaactcagacacttcctcatacagtcttcttagtgggcttcctgctgacagtggatgccagggacccaggcagggaggtctcccttttgaaaggggccactggcctttgggaaatagtagagaccagtgattaagagcttgatctccagagcccctcataggccgtcagtgacatgagagcagagaccggctcagccttgttctctaccaggtccccagggccaaggacactgaaagccctttttaaaaaaagtgttgaatagtaaatgagcagggtcttcctcttgggtctgaacctcagctctcctacttgaagcctctcttgacttgccaacaacttaccgtgtcatcagcggggatggtaatggtaccttcctcctgggggacagtagagtttcagtgagataacgtgtacatcactcagcatggcacgcagccatgcgacgtgctcagcacatgtggctgtgatgactgtttggtttgcacaggcatttctatgtgtggaccttgacgcaggttcccacaaaggactctggccccatgggtgacggtgtcacagctgtccttttggaatcttcacctcacctaaactccctggcagtaatagcccaggggagagagggcatgtgggtttggccaagggaggggatctctggggaaagtcaccctgtttgtccaagaagcgcctgtgtgtatgtgtagatatgagtgtgcaaatgtgtgaaactgtgtgttcatgcctttgctgcaggcccacaaggtggtttaccacgtgctgttgttgcctggaaaggtattgcgcaggatgccatgtggtatgatgtccctggccccagcagccccagtgactggtgagcggctcctaggtctgctcctgcctccagtagaagcagccacaggagtcctggccacagcccccattgcggcccccatcgtgctgggtgctggcttttggaaatccctgcatacccgcaacggctcccgtggtgggggtggaggtggaggagctggtcaggccacccagaggcatcttcctcagtggagccttctgccaggtacctctcagctgttttccaaatgactacttagcatttccctgcctcgatccccacagcagccctgtagggaaggagtggcccatttcacagatgagaaactcgaggcttacagagtcagtctgcgcaactggggctgggggcaatgtgctggttaaaatgcagattcccatctccccccgccccggaggatgggatgtgggaatcagggtccaggccttggtgttctaagcagcctctccaaggagctgcgttgtcaggagagtgggaagcagaagcaggagccttgggccttacagttctgggagtgtgctctggccctgctgtttgctcagttggggcaattgcatcagcttcctgggcttccttcagctttctcagctgtgagctggagagagtggtgcccacctccaaggggcctggtgaaaattccatgatcagttcgtttatctcacttgggatagtggaattcctggagagttcaataaaatggtttgttgctattgttccacatgggatttactacaaaagcaatttcagaaacatccaaaaagatatccatgtgcataattgacagtagtgtatctgctcatctccttcgaagtgggagtttcacaggatggtgaatcagggttgctctacccccattttagagattaaactacagcaggcagggcaaggtggctcacgcctataatcccagcactttgggagaccaagacaggaggatcacctgagtccaggagttcgagaccagcctgggcaacatagtgagactccatctctacaaaaaaaaaaaaaaattagctgggcatggtggcctgcacctgtggtctcagctactcaggaggctgaggcgggaggatcacttgagcccgggaggttgaggctgcagtgagctgtgttcacgccacttccacttcagcctggacaacagagtgagactgtctcaaacaacaaaaaaagaaactacagcagacccttgaataatgttttgttataaaacattgatgagaaaaaaaagtatttcctggctggggccactgtctgttgggtttgcacgttctacccacgtctgcgtggctcttctgcaggcacccccacccacctacccacatcccaaacctgtgcctgtcaggttcatcagcacgtccgcatggtcccggtgtgggtgagtgtgggtgtgtgggcgtgtgtgccctgcgatgggagggcgtgctggccagggccggttcccgccttgttccctgagcagctgggatgggctctggccacccgtgacttggaactggaataagtgagtaaacagtgatcttacttgttttgacaaatctttcttaagtgtatgtacagctcacatgtattttaatgtctaatagtagaagtgttttgatctttatttggaagtttggtgttgtttttgtgaccagaaatatgccttaggaacttaagtcttgtttatatccattagcctgtggggaaattgtttttcatcttctgctgtttccctcaaagtcatggtttccaagaacctaccaacaaccttaagtgaggccttgctgtactgaggggccacctgggactcacacaggtttttagctaccagggttctggggctcctgaaatggactcagctctccttcagacacctacctgggctgtgttcccccaacggacagtggtggatgtgggttgggatgtcacaggtcactgcaccacctaccacctccctggagtggcatttcccagaacaccaggacacactgccgggtgggaacaatgacgctggtttccaggagagcagtgggggtgggagaggaagcatgcctacctgtcttccatacctgatctggacccagcaaacatggccctgaggtgctccacgccccatacctctctgctgggggctccacccacagcccttctgctgagatggtctcgggcctaaccaggacctcgctggcccatttgctcactcagtcatgtaagagatgtctgttgcatgtttactatgtgctgcgccctgtgctgaggctggagtacctggctgaccccacagacatggtccccactgtcatggggcttacacttaaacagggaagatggacagttggaggatcaagagttttcccagcgagaatatccagggaactctggggatgttctgatccagccttgcgtggggtgcgaggaggtcctccccacgatgttcaactcaaggccttagtgaggagcagagctggtttggtgctggggcagggagccaggcccgtccagcacgtggtacactgatgagggaatgcaccaggcaggcagagccttcgggcacggtgaggagtgtgccctgtcctcagcatagagaggccacgccttgtgttggggagccaggttccatgtgggctgtgagcggcccactcagcctgtgcttcagaggctggcctgggtgcagcccggcgggggccaggccagcgactgtcagctcctgtggcgtccagtctttttgccaagaggcctctttaattcacattttccacatcgacttgatgttttgaaaatgtcgacctttagttcatcaaatgtcacttattaaatcataagtcacatcccattcaattaaaaaaagacaatggactggtgactcagtgtatggtctcttggcaggagagaccctgaagcacttgaggccagaggaagacatgcgccttgtcagtgatccctgcatccctaggggtgggcagcacgtcattcctgtgagaggctggactggagagagagactgggttggcagccaggctggagaagctgtgaccagcctggaacgccaggcccaggcaggtggacttgaaacttactcacaagaagcaaagagccctgttggaaaggtgaggtttggtcagtcaggccagagaggagtcaaggccatgcatggaacagtgcttgactggaagagaagcaaatggcaaaatgtgtacaggcagggagtgaatcagggtgcttcctggaggagggacacttgagagatgagttggagtgaagtcagtagaggtgaagggattctagccaagggctctgcggcctgatgagaggctaggaggtgggaaagagcgggggatacaatgggcaggtgagatggggctgcatgtgctgcctcaggcactggggagccctagcaggttcttgagcatgcgtgttgctcaggaagaaaaataagatcaagtgaatgtaaaagctccctacagcttagaggagggagcaccgaaagtcttttggtatgggttagaatggttcccaaaggctgtgaggggagggttctccctgctgagatgactgcgccttatcagaccttcatggagacggaagacagactgtggagaccaacctgagaatggattgtagccttgccctcctacccttgcacctcagtatccctatttatgaggtgggagaagcagtaatctgcctcacggttgtgtgaaacgtaattaagccgtgcatacaaaatgcctgaagcatactgcaggcctgtagacagcactggggtagccaagggttggggcccctggaaaccccacaacaagaaattcacagctggggaattcaagagctttttgaaaaacagtgttggggccccaaggccaccagtagaccttaggaacatgatgtacgctgaagttcattcaaataacacggtaaagagactggccaccatgttttatgtatcttaaattaggaataaggagaacttcttgaagcctcagtttcctcatttgtaaaatggggctagtgactgcttcacagggctgttgtgaggatgaaatgaatggggctgagacgcttggcattggacgtagctgaggtagggtctcaggtgatatccctggaatggttcgattcattgccatgcaccatccttcctcagtagaggagtacacatttctgctccagtagtttcaaggagatgcttataaatatgcgttccttccttgcagacatgcctgcgggaggagacttctcttgagcctgggactcactgccttgtgtgcagcaatgaacagtcacagctctggccccaccctttgctggctttgggaccttgggcaggtccttcaccgccctgggactcagtttcctcacctgtaacaatgggctaataatggtgcccccccacccacccttaagcattgtgtgaggccaaaatgagaatagtgcacctgccaataagggctcagccatggccacgtggtcatggaacccctcctcctggggtctcacgtggccccaggaccccaggcacccctcttccatggaacttggcttcttccccgggttcttgtcttacagcttacgttatggttcctggagtgagaggagtaaaatcggtctccccatctgctctctgctttgccttccttttcacttttcatctccccaggctgttcattcgctcattcattcatacattcactcactgacacatttacaaatatttatactggtcactgtgccaggcactgcgagactcggtggtgaacggcagggatatagcccctgccctcatggagtcttgggcttcagcaattaaacatccaattaaatgtataattctcagttgacatgtgactataaaggagaaaagcagggggctgtgaggcctgcgtcttctaggggatcgggggaacctgactgcagtggtatttgacggctgtctgaaaggtgcttagggttcactgggccactgagaggcagggaggcccaggtggagggagagcatgggcaaaggccctgaggtgggaggtcacaggtcggccggctgaagcggctgctggacagagagctggggagtgccagggctggaggactcagctggccagaccatgaaagctgcataaaacaccgtaaggagtttatcctaagaagcttcagcccttacagggtggtgagcagatcctcacgaactcttgatgcgaagggaagagcggacccattccgggtctcgggcagtgtctgagcaaggggccggtggtctgcgcatctgcacactaggcccttcctcttcagtcacacgctagaggaacaactcacaatttgcacttagtcctgaatccgggcggtgacacagaagaaagtcatagacactcggggtggggcagaggggccctcactgagtcctctgccggcatccagccctgatgattgattctaatccaggccgcttctgaggacacgaggaaaaggctattagcataggccctactgcgtacctggcagacccaagttcatcatctcggctgaccttaccagccccccgctggcatgggtgggggtccgctgttgtccacagaaagaaaacagggctgggagcttgtgagggccctgcccaagattccaaggcccctgccagccagatgtttggggccaaagtccatgcttccctgccctgtgggtaacacgggggagattactgtttgaagtactttggacagtcacaccaggtcaaaaggtctgtgtggtcaaaagctacaaggcctgtggctgggggagctgtgctgaggacgtgattttgaggctttcttagcccagacttaccttcatagcttcctgggatctcccaggtctgggtcgtcatcggcgcccttaccggggagggctctgctcccctaaatgcccctgtgcacctgccccagccccttccctcctcctggtgcttgggtcatgtcgttccctgtgcatgccagtccccttacgtgcacatttttcctctatgatttttcctgttttgatgagacactgctcttggcggtgctggttcccaagaggggaccaggccccggcctggccagctggtcattcaggaactttgcttctaggcccagccccacacccagccacattccactagggccagaacctttgagctccgtgtgaatggggcatgtcccacccacgcccaactcccatggccgcctccttatcacccttcccagctgacggaaaaggccatattccatcctggaattagctttcccccatttctgtttgcttccagactgaagggtgggaaaaaaaaatgtcctaaaggtcacagtgccgtcccaagcctttgaagtgtggctgctctcattggctccacttagcaggatgaaactggggctcagagagctgccgcaggtgcctggtgctgctggtcacttctttgccacctctgagggaatcaccttaaaggggcccctggagccctccgtagccctcacacctcatgtgctgggcctgggctggattgcagcccttgctgctatcctccgcaggtgcccttggacaggggacagcctgcccagctgtacacagtggccttggcaagaccacagcatggcccataggtggtggcttcaggatttggaagcccggtttctctaactccaaactccacagtcagtactttggggttctggattgtttgtcggctgggttagctctgttctatttttccaactgtttcttgcctttaagctgtgctttgcctacaggccttttcttaattattcagctctgccagaggtgcttctgtagaaagtacttgtcctgagtaatttcaagcttttaatcttacctttgaagaaatatttaaccatcccatgctcctatatgtttgttcatttcttattcattctttcaccgaacagcattgattcagtgccagggaggggcagggacagaggtgaacaagacatgtctccagcctcaggtagctcaggtgtgtgaggcagtgcgctcaagtgggctcatcagttccctgacggggaactagcagaggagggcaggagggcgtggagaggtatggcaaccttgaaggactttggtgatggtgatgatcatagccagccctgaatagggttctctttatgcctgcaccattctgccccctcacatctgttaacatgcttcatccccacaaccagtcattaggaacaacttacacattgggaagccaaggcacagagaagttatttaacctgcccagcgttgcctgagccagggcagagctggggtttgaacccaggcctcctggctcctgcatctgcccccctcaccactgcacctcactgcatgcacgggagctctttggatgcagggatgggagcggtgtgtgcaagcctcagagctgtgaccgtgaaagaaacagactgctctgaggctttgctgcagaatctgggccagcaggtgtctgggaggaagccacccttgggctggggccaagcatgggtcctggggtcaggacaaggagagggactggtgcttgagtccttttggagctgcagatccatggtggggcttctgaatgatcttgtgtgaggaaggagtccagggtgttagccacgcctgtgtttctttgtgagcacaaaaacatattccatagccagagttccacagtgtttggagctctgcctgagaacctaggctgggactgtgtggggaggaagggccggcgagagcggatgtaggctgagccagcctcggctggagaccggccctggcactgactgcctggggtcactctgggtgaaactcatccaccctcctgggcactctgcgctctgcttcaaatccaccgccgaaaacaagctgagtcctgccccagcctgcagggcctgtgggatgtgtcctccatccgcctcgctgacctcgtcccatgccacctgcccctccctgcgtgccagccgcagtggccaccgctgctgctgacacaggccagccacacacccacctcagagtcttggccaagcactggccattccctctgctcagaatgctcttcccaggcacttggcgtagtggctccctcccttccctcgggtctctgccctgacctcacccagcctgcagtgccctctgtccggctctgtcagacccacgtgttctctttcatagctcctcccaccctctggaacagtcccatctccctttggcttgtttattatctgtcccctccatgggaacctcggttcctcagaggcgcaggctttgcctgtcttgttcatgcctgttgccccagtgccatcaatggagcctggcacttgtggatgctgactactcgttggctgaatgaatgaacctcagttgccttatttgtaaaatgggaagcatcacactgatctactaacgttgctgtaaagacgaaaggcatgttatttgggtcaagacacccagcactgtgcctgacacatagtaggtacttaggaagtggtaaataatgcgtgtgtcagccaaagtgtgaattactggccttgtttagacaaagtgtacacggcatagctctattttttgacattgccaggatagcctggtgctccccagctctaaaactcagggtgataggtggggcagaataaggtaagggcagaaaagaaaagaggaggaagtgaaaaggaagaagccctttgcagtgtggactacttttcagtagaaacgtagaaagacatagtttacctcaaggcctcgctttgtccactggaaagtttataaattcctgccaagaacttttatttatttatttattttttaattttattattattatttttagatgaagttttgctcttgtcacccaggctagagtgcaatggcatgatctcggctcgctgcaacctccgcctcccgggttcaagcgattctcctgcctcagcctcccgagtagctgggattacaggtgcatgccactgcacctgctcatttttatatttttagtagagacagggtttcaccatgttggccaggctggtgacctcctgacctcaaatgatctgcccaccgcagccttccaaagtgctggattacaggcgtgagccaccttgcctgggcaactgagtgagactacatctcaaaaaaaaaaaaaaaaaaaaaaaaaagatggcacaagataaggggggagataaggaagtgcagtagaggaaaatgtaggtggagacttccttacaccatcgagaccacacaaatgggcatgtgtttatagaaaggcccagtggtgaggatggcaatggtggtgagcactcccgagcacaaaggtggatgcccttcagctgtaagatcccttttccttgaagaattctccacagcaagctggctggccagccttgacttttctcttcctgaagggagcctggttctctactgactcagcagggaatgtgtcctttagtgctacttattgatgtcaggatatgaaaaacttccccaacctcaaatttgggacgtccttaccagtgtttctcaaatttcaatcactctagggctactgtcacagtttgtgccacacctacatctactcctactgttatatgctttgtattttatttaaatggactcactttttaaaaagcttgcatagatgagttttaaaaggcaaacaatttaccttctctctaaaatggaagaccaggatcacctgccatgagtccaaggtacctgtgaaagtcaaagcagtgagatgaaagttctagcatagagctattgctggtagacagttctgtgcctgaagctgagccttctatttatttatacgcacatatatacatacatacgaactctccctctgtcacccaggctggagtgcagtggtgcaatcccagctcactgcaacctcagcctccccattagcagggactacaggtagcacaccatcacacctggctaatttttgtatttttagtagaggcagggtttcgtcatattggccaggctgctgtcgaactcctgacctcaagtgatccgcccacctcggcctcccatagtgctgggattacaggcgtgagccatcgtgcctggcctagtcttctttttactaaaaagtgagattattaagtgtaaaaagacctactagtaccaaatgagatttttttctaaactcgattatgagaattgaaagaaaagtggaaaaataatcacttcttctgtgggtgatttgtgttatttgctgcccaatctgggttccacctaaaaccgtctcaggtacaccactgcgcagcctcccagaaccacccacctccttcctgacggccaggagacaaaggacccttgggcgcgatcagccgcaccttcaggctgagtggccaggagtcctcccgtggcccagcccacctctctctttcaggaattcaagtcagcgtttttgttggtccggatctgaagccacttcttccaggcagctgcccctgatctctcaacttcatagcattttggctctttaaaaaaaaagaaagaaaaaaaccaaacgtgtgactttcttagaggtgttagaattatcctcctggtatgttgttattctgacttaattccgagagcagggctttgtcacacggagctggtacctactgtgtcacagcactgcatgtggctcaacaggccagggcttttaatcgcttttgacatctactctctgaagaaatacatttatatcacaacccagtgtacaatacatgaaaactcaacatggccgggcgcggtggctcacgcctgtaatcccagcactttgggaggcagaggcgggcggatcacttgcggtcaggaggttgagactagcgtgaccaacatgctgaaacttctctctactagaaatacaaaaaaattagctgggcatggtggtgcatacttgtagtcctagctactcgagaggctgaggcaggagaatcgcttgaacccgggaggtggaggttgtagtgagctgagatcacgccactgcactctagcttgggccacagagggaaactccatctcaaaacacaaacaaacaaacacctcaacggttcttctcttactacacacaatgacaataaatattttgtagtcttttttttttttttttttttttggagtcttgctctgtcacccagcccagagtgcaatggcatgatctcagctcactgcaacctccacctgcctccagggttcaaacgattctcatgcctcagactcagtagctgggattacaggcacgtaccaccacacctggctgatttttgtattttcagtagagacggggtttcaccctgttggccaggctgggtctcaaactcttggcctaaagtgattacaggcaagagaaggataaataccacatttaggagagtatttctcctgggatgggatggagatgggtcaaaatggaaagtgcagacagaagaggaatataggggctgtctttttttttttaaatgctggttgcaatctactactttgattttttaactcactagtcatcgtcatctgcagttggtaaaaacattgttgtagagggttaaagcatgaaccatattaacatgtccccccccctttttttttgagcacctattatatgctgggcacagtgctgaacactgtctcattttgtcctaaccacgttttgcgtatcaggccactgagtctcagagagggacatcacttaagcccggctcacacagcaagtaagagcaaattaagattccagcctgggtcagcctgacttattttcatgtccttgaggccttggagcagttcccttgtgtatctgctgcaaagccttgctcaacgctcttcccagaggaagtgatcaaatgaaggaatcaaatatcaaattgctatagaaagaaattcttttttttttttttttttttttttgagacagtctcactctgtcacccaggctggagtgcaatggcacgatctcggctcacggcaccctctactttctgggttcaagcaattctcttgcctcagtttcccaagtagctgggattacaggcgcccgccactatgcctggctaatattttgtatttttagtagagactgggtttcaccatgttggccaggctggtctcgaactcttgacctcaggtgatccacccgccttggcctcccaaagtgctgggattataggcgtgagccaccgcacctggcctatagaaagaaattctaaaacagtctctttaatattaacataagccagtgcaaagggttcccaaatgtggctgatgacttggttttctttctttctaaatgtttaaggaatttttaaattgaggtattgcagattgtaaagtgttcttatcttaagtatacagctcaatggcttttttacctgatacccccatgtggccacccccagatcaaggtgcacaccactttcagtaccccagaaagctcctgcatatgcctcttcccagccagcacccccaccacggggtgacctatctcctgacttccctccccttgctttagtcttgcctgttcttcaggtcacacacgtggaatcatatgatctgatctgtgtgtgttggacttctttcatcccatgtcccatctgtgggattcattcatgtggtcggatcagtgcttcattcttttttattgttatagtacctgattggggtacttttgagcttattttttatttcatagactattttggacatatagaatcatatagaatcacacccacctcccatcctaagaagcaaaccttaagcccctatattcctcttctgtctgcactttccattttgacccatctccatcccatcccaggagaaatactctcctaaatgtggtatttatccttcccatgcaagttggtaaatttgtactacctatgtacaatttcttaacagatcctttgagtgagtataaactctctttttcttatttggtattgccgagtccaattaaattttaatttaaatgttccaagtgtttctgggattcagaacctcagctccatgctctagaggtcaagacagttggagcaaagtccagaaggaaaggccaactggggagaggcaggaggagagcagagtggggagagaagcggagggaggtgggtgtgggagggagatgctcacagccctcagcagccatgatctggtgggggcccctgccgctgccctggtttttctctcatcttggacctatggggaatgcaccgtgcccctctttctggcctaatttcctgtgtccactggtgccacctctttgcagaggcagccttcagagggatttgtgggggagaaggagcttctcctttgggaagaaaatgcttgtggtcctccatgtaccctacaccctgcagctgcgtcacaggggaagcactcccccatgggggccaggcgctgtgctaagccttttccctgtactaacatgtgaaccccctctgagcaagccagcgaagtgagcactatttgacagcctgagaaactgaagcacagggcagtgaagtgaattccccgaggccacagctagcaagtggcagagctgggacttgaacccagaaagggcagctccaggctcaccacccgtatactctccagtctattgtctagtggaggcacgggcggcccaggggccttccccgatgcttatctcattctgtaactctgcattctcagtggaggttttcttgactctagctccaggcaggcagagactgcctttgtttggctcccatttttatcattagcagagcaggtgctagtgatatttgcagaacaggtgctgaatgaatgcatgaacaaatgcatgaatgtggaaatgaaaggggatgcagatggagatgatgcagatggagatgatgatgcagatggagatgatgcagatggagatgatgcagatggagagcagtggccatgcagagtctttgcagaccttggcttggcttcaggctgtgggggctctgcaagccaagggtttgagttccacctccagtgcttgccagcaatgccaccttgggtgacctttatcttgctacctggaaagtggggatgctggcagcccctccctcctggcatcactgacactgcatggtcagggtgtgatccctttgggtacaggcgggggtggtggacctcccaggtgggcaggtccagtttggatgaaaggccaaggacgattcataggagagcacaggagtccttgcttagccccagcaattccacagaacctgctgtgaactgctggctgctgcccgtaacttttccctgtccctatttccactccttggaggccgcaagaacaactgctggctggccttggccactgcctcagtgttccagcctctgccgtcatttgacaccaagaagacagccaggcaggccttggctcactgcagaggtgttactccacccccgagtcctagccgccccctgtcctctgggtcctggctgggctgggcaggagggcactcacctctcccttctctctctgccctagcatgaaccagcagaggggctctcaatcctggtgctgggcagtgggtctagatttccctttccatctgcaaatatacccaccatttcccttccctgcattctgcgctcagcagggctattcacaggaagcacagaggacctctccttcacagtgagcagttgaccttttttgagcacctactgaatgccaagggttttttctacatttcaatttgtgatctcatttgtttctcaaaatctccctaggagggagacgtaatgcccctccccattttactgatgagtaaactgaggctccaagagattcagccagttgcttagcagagtcaggatttgagccgaaagctggcttgtctctactcccctccatgctgctctgcagaagagagaagccatagaaagctcaggaatgtagtgacagtcgcagcgctagcgatgatgataatcacagctcacatccaccatgtgcttgctacgtgctgggagctgccattcaagccttacatgcgtttctgcatttaatccttactcctgtgaggtaagcagtattttaaccccattttacagatgtaaaacactggcggttcagagaaaaatctgtccaaagtcatgcagctaatgcatgagacagcagagcccctggctctgaaaatccgtggagattgaaataccaagcacactggttcatccagacagtgggatattgttcaggattgaaaggtaatgagctagaaaaatgtgaaaagacatggaggaaccttacatgcctcttactaaatgaaagaagccaatctgaaaaggttctataccatatgattttcactctgtgacattctggaaaaggcaaaactatggagacggtaaaagatcagcggttgccaggggttgcgggagggagggatgaataggcggagcacggaggatttttagggcagtgaaactgtgtgtgatgctgcagtgattgatacgtgtcattagacatttgtctaaaccgaaggaatgtacaacaccaagagtgacccctgatgtcaagtatggactttgggagacaatgatgagtcagtgttcattcatcaatcataacaaatgaaccctgtggtacaggatgttgatagtgagggaggctgtgcatgtgtggggacaggcaggatatgggaaatcgctatcttctgctcaattttgctgtaaacctaaaactgctctaaaaatatagcctatgttttaaaagagggaaaaaagaaaaacaggttcacgatgcacttggtgcttgagccaccacaacccccagcagtgatgtgcagcagggcgtggctctgcactctgcgggggcttcccgggctggcttagctgtgggatcatcttctccagtggttcttccaggcctgctgtcaggtgcagtttgaaatccagttcaggagtgcaccttgcgtggggagctggagggaggcaatggttgctgttgggtgactagcagaggctgagggaatggcaggcatgccagggctctgccagtgtatagacagatcttcccccctggggaggaggaaggaggaggtgaggggggtgacaacaacattctttggtccccattccccaggacagcgtgtgctcaggggaggctggcctcacccctgccagggaattgcaaaattcagcttcagttgaatgagtgtcctttggaaaagtacattttgctcaggagccaagtaaaactgaggactctgcagccagcacactgaagtcgctagccatgactcacaccgagtgggatggggagggccaagctgggaggcaagccatggctctctggtgggtccaggctccctctggcgccagacccctcggctgggctcaggtccctcagctgggatatttcgtgtgccagaggtagcagcctcagatggctttgtcagggttcagactctccttgctatttagaaaagatgttgtctctaagaagtcatggagaaaatgaatcactgtaaaaatcaaattttcttatccacttgcattattggtttagagatggcttctctccaagataagtttttggtagactgcagatcaaaatgtttaggggcatctgggggtgtcatgagaagagccccagatgggacacccgttcttccttgtgacattagggaatttggtacagctttctggatcagtttttgcctttaagatgcatctggactcatcaaacccagaaagtgtagagcaaatattcctattcccatgtccttggcagacattgctaatctatctcagggctccaacagagttgggtctcagccttaccagcctggcagccactagacttgatccctgagatgaaacctcttgaccacacaggaactccatgatcttgaagctcccttctggctctataacttttatgtctctctctctcttcttgctgtatctttcattctactgactattctgatacaaaaatacttcacgttcaagatttaaggccaagttcacaaactgataacactcaggccaaatctgacccacagaagtgtttcctttgctttgcgtattattttatttttgaaacacttgccatcattttttaattggtgattttacctaattccccagatttctggtttcacttaacgggctgccctcggaccccttggttccagccatgtgccaagctgggaggctttctatggactccacagtttgccacaggccacacccagcccacttctctaatttccagttcctgcctattctcagtaggcatttttctactccagacaagtatacttctgtcccacatgtaaggcctggctgtctctcatttgctgatgtgagctgctagatgaccaacgctccggtctgttaactcacttgggatgctgacgtttcctggaatctctttcagagggaaaggtgtttcctctctatgaatcataactgcctgatgaattagttttacatttttattttctcatgtgggctttcctcaaagcaggggctcagttatgccatgaactgttgaagaaagcacaagttgaggcagatatgggaaatttagcagggggagcggggagcagagcccttccctccctctcgcagccactcccttcctccccgcctgcctgcctggatctcctctgcaaagcctcattgctggtgggtggtgaggaagccaagtggctccccgagggtacttgcctgcacagctcaggtgagctcttggctcaggaaagactcacagtcttccctggctcagcgggccttttgctgcttaaagatgatgctcgccacttcagatcacagtgccagcccctggggaaccccaagatgcgtaagacaacctcctgcccttgaggaattcacagctttgaggggaagacaccaatagtattaatgaggcagtgtgggccgtgctgttgtttgtgaatgcagtccacgcatgctcagtgacatcaatcatcgcatgtgcccggtagtaacagggagacctcaggggctgcagaggtccccgtgggggcacttcatccggcctgaggctgattggagatggcttctcagagaaagggatgcgtgagctgagttttcaattgcccgagacctctgacctcactggccactccagctgtatcagcctcgctgctgttccaggaacctgccagatacgctccctgcctcgaggcctttgcacttgctgtcccttctgcctggaatgctcttccctggctatccctgtggctgttgtctcacttaattccgatctccatttgcatgtcatgatctccttgtctgatgagccccatccgaagggccctggcattacactatttccttaacctgttttatttttcttcataacgcttatcagcactgacatatatgagttcattcactgttggtctctcccactaggagataatctaggtgaagactgggagatttgtgtctgacctccgatgtgctcccagcacctagatcagtgtgtggtccacagtaagcactagaggatgcaaagtactgtgagctgatgaaggagagagagggggtgatgcagacagatggcaccaagctggaatagcagtggtctttggggaacaaagaatgttggcgggcagtggggtgagaaggaggggcagataacacacagccaaagacagatctgctaagacaggccctgactgtgtctttcttttcatttataacctgcttattatagaaaaagtgacaacactgagatgtgccgaagtggaagtgatcaccaactagcctctcagccaggcccacaaggaaaacattctgacccctttcctaaggcccttttgcctgggattgtgtggagagtttcgccttttcatttgtgagccagatcttgctttctaaagtgcacagctagctgcctgccccttcaggtctcttcgctgtgctcccagcccagtgcagtaaccttgtgttcagatgggcgaggacatgtaccccagcttggccacgagatagagtaacctcgggcctcagggggccatgaagctttgcaggaacctccaccctttctcctccagcctcgtccccatgtgtctgcctgtactcaaggcctcagtctgagtcactgtctctacacagtctttcctgaacctcagttttatttttctgtaaaaatggggatgaagctagtgtttataccttgaatggttttgaggatcagatttgaggatcagatgagacaatatgagttactacttgggttcatgggaggtgctcagtaaatatcattctccttcccctcttaaaatcttaatcctgcactgtgcttttaccccaggcctcaccagaactcagccttgacttatttctcaaggtcactgagagtgttgtcaaaaggtggtctcaggccaggcttggtagctcacacccgtaatcccagcactttgggaggccgaggcaggtggatcacttgaggccaggagttcgagaccagcctggccaacatgatgaaaccctgcctctagtaaaaattccaaaattagcctggtgtggtggcacatgcctgtaatctcagctactcaggaggctgaggcaggagaattgcttgagcccgggatggggagcttgcagtgagccaggatcacaccactgcattccagcctaggcaacaagagcaaaactctatctcaaaaaaaagaaaaaaagaaaaaagaaaagaaaaaaaaggtggtctcatagcacaaagcaaagctgaatcaattgggcaggtggaggtcaagggacacttggggtccccaaaaggggcacctttcacaggcatcttggcatggctccttcccctaaatactcccctcctaaacttaaaaacactgacaccaacagtttattctttttaaatctctgtgaaaggccgtgcctggcggggagccacgggcatgagaatccagtccccggaatagctcctgccgctcagcgtttaaatgccgtctgtatttttatccgatgatgggccacttttgaaaaaccccgctcatgctctgcccctctaagaatacatttccatttatagcatctgcacacaggatgttgttctatcccggtgtggggccaggaggccgtgtcctgtttccagtgagttggaaacacttggggggcccttgctccccccagcccagcactccctgtggccttgacaagcgggaagcctgactcccggccaagccctggctgcctttcctcttcctgtgcaagcctgagctcatctgtctgtcgcaggttggggaggcaagtgggggtgaggggcccctctccagccttgcccagccagggcctccaggtgacacagcaccacagttccttagctccgtggaccctgcatccttcactcactcacccagtgccacggcctgctgtcagcatgggccctgcatggcacaggagagcagcgatgagtacagagagccaaggctcccagggcccagtggggagctttggggaggccagggaggatcagtgttcagtctccaggatgaggctggccagggttccagtcctgactctgcttcttgttagctgtgtgagcttaggcaagtggcttggcctctctgagcctcagtttctgcatttgttgaaggaacctcaggagtagtagggaagattctgtggacagagtaggccaagtgtctaagcagtgcttggcccatagggtgggagtccaggaaatgccagtcccctttcccgtccctctgttgacctgtggtaactcaggtgggtgcaggctaaaagtcttaggaaatctgcttgaagttagatataaacacatgccttacaccttaggaattctagcacgcatgggcatctcctgaactgtgcttttcagcaaagcagattcctgccctgcccacctcacccctcaccagtttagttcattctacagtggggccctggaatctgcaaattttttttttttgagatggagccttgctctgtcccccgggctggagtgcagtggcgtgatcttggctcactgcaacctctgcctcgtgggttcaagcgattctcctgcctcagcctcccaagtagctgggattacaggcacacgccaccacgcctggctactttttttgtatttttagtagagacggggttttaccgtgttggccaggctggtcttgaactcctgatgtcagatgatccacccgcctcggcctcccaaagtgctgggattacaggcatgagcaccatgcctggctggaatctaagtgtaacagcttccacagattctgaggcagtggtccttggacaatttttgagaaatgctgccttcttcatccattgcacaagtgcttctcctgaacctactctatgccggacacttttctaggccctggtgatgtagacagatggggttccagctctctggtgacatattctgatggagtcaggcagtgagcagatacacataactcaacatcagggagtgattttaagtgctgagaagaaagaagagggcagaggctgggcgtggtggctcacacctgtaatcccaacactgggaggctgaggcaggcagattgcttgagcccaggagtttgagacagccagggcaacatggcaaaaccccgtctctacaaaaaaatacaaaaattagccaggtgcagtggtgtgcgcttgtcctagctccttgaaaggccaaggtgggaggatcacctgagcctagggaggttggggcagcagtgagccatgatcgcgccactgcactccagcctgggcaagagtgagaccctgtctaaaaaaaaaaaaaaaaaaattaaaagaagagggcagagtaagcacaggctcccccgaggagatgacatttgaaaatagacttaagtaagggagcaagccatacagagatgcaaaggcagaaccttccaggtagaacggtaattcattcaagttctccagctgttgagtggcagaaagtcaagggctttccatacctcctctgctttttcttttacatgctatctataagggtgcttttttagctgaagtagcagaaaagtggactagaagaggtttaaataagagtttttttgttttcattttttttctcatgtaacaagaagactggaggtagcttgcttctggtgttggctcagcatctcaaggatgccagagtttttatctctgctctcaactgcacttttcccttatggtctcagaggagttcccccagctccagatgttatgtctgcacccaggacaggaagatggggttggggtagaaatgttagtgccggtgatgtgtgaccctttgattataaaaccaaaagccccctacccccccagcaggcttctgcttattatcatcagtcagagcaatggtatatggccaccccatgccacaaaggaggctgggaaagtgaaagtaagtggttagggttaaagggaatcagaatccaacaaggtctacctattgcctgtgggctttcttgagacaggatctcatcctgttgcccaggctggagtgcagtggtgcagtcacggctcactaaagctcaaactcctgtgctcaagtgatcctcccacctcagcctcctaagtaacagattacagtcatgagctaccacacctgactaattttttaatattttgtggagacgggatctcactatgttgcccagggaactcctgagctcaagagattttcctgccttgggataacaggcatgagccaccatgcctggccacgtcctttatttattgaagaaactaggtcatttattctgtagaatgcccgcattatggattgggcttattgaatcatgtaacctgttcctggtattttctgtaaactggtggttagatctggagccttgattaggctcagggtcagttctctgggcaagaagcattcctgggtactgctgtgtgctttgtattgtgtcacattgagaggtacagaacaactggctttcttcgctttgagatgctcagatggatcactgcgttcaggcaggcagatggatcactgctttcaggcaggcagatggatcactgcattcaggcaggggcagcctgttctatctgttaggaagtttcctgtcgttgctgattattgtctagagccaggatttcatcagtggatgcacaaagaggatttttctaattctcttagtctttctgcatacattctttgaagttattctataaaacagaacgttgccctcatcaactatttggctagctagaaatacattttataccaagaaaaaaagtcagagtaagtgcattctctttatttaccaattttcagaataatgagttggtggtgtaggatcttaaaggtgtccaacaaggcttgttacttgtttttaggaagtatccttatgaactcatggatcacttaatgtatgggatgtatttcaatcacggctgttattaaaatgttttattcagacagctttattgaggtataatcgacttacaataaatgtcacatgtctaaagtgtacaatgtgaaaaatttgacatatgtatacgtccatgaaaccatcatcacagccaagatcatggatatctacaccacaccccaaagcttgctcctccctgtcctttccgctctccctgggcagctgatgatctgctgtcactctagattagttggcatgttctagcattttatatagacagaaccataccatatggaccctagtttgcctgccattcagcataattatcttgagaatcatccatgttgttgcagtgagccgaaatcgcgccattgcactccagcctgggcgacaagagtgaaactccgtctcaaaaaaaaaaatttaatgaagcctaatttatcatttttcttttattacttgagctttttggtgtctcatctaaaaagataatctttgcctaacctaaacttacaaagatattcccttatgttttcctctagaaggtttatagtaagtctggacatcagatccaaatttgttctttttcacagttgctttggctgttctaagtcctttgtatttccatatgaatcttagaaccagcttgtcaatttctacaaaaatacttgctgggattttgattggaattgagttgaatctatggataaatttgggaagaaatgccatccttacaatgttgaatcttctgacccactaacatgtctatatttccacatttacttttgctttcatgtcttctttaatttccctcagcagtattttcagtatatgggtcttgtacttttttctcaaatttatctctaaatattatatatatgtgtgtgtgtgtgtgtgtgtgtgtgtgtgtatatatatatatatatattttttttttttttttttgagatggagttttgctcttgttgcccaggctggagtacaatggcacgatcttggctcactgcaacctccacctcctaggttcaagcaccacccccctgacacagggacacacacataaaatgtaacagaatgcagcgttctgccttggccttttcctcttactgtatcctggagattcccctgtgacagtgtcattttcccatctagctgtatcaccctctgcgttatgggtgatctgtagtgtcccctttggctggatgtttggatgacctcccgtcatttgctattacagctggtgctgtggtacatagccttgtgtagatgtcaatttatattttcacctggagttcactgagtgctattaatgggccaggccctgcgtgacccacaggagattcaaggacaaatctgacccagcccagcaagagtggaagaccctgcagccagcctggggctgggccgggtatagtccccagagcctgtggagactggggagctgccttgggatggggagtgtggtttgtctggccttccggaagtcaagcagtcagatttactcttcttcctctttgtccagacttggtctttgtgggaaggaggggaggggaaaggccaagattttgtggtcagaaagggttatcacggatgggagaggtcacatgtggagatgattggggtagaagtggaggctgctggagctgggaggccatgccatgggcaccaaggtctagggagagagctgcagggagaaaaccttatatgcgttggtgacatcagcattatgtgctatgtagaccaggagtcgtcacccagatttctcataaatccaggccttcactccttcacctgccagcctgtttccctcttccaggcaggcatgtggcccaggggtgagaagaattgttctactgccagactgtgccagttcaagtcctggccctgcatcttgggcaagtaaaacagaaagaatgctactgtctaccatacagggttatgaaagtgatccgagatactgaacgcaaagtgtaagccgaggcttcgtgcgcagtaagccctcgcaaggggggtagcagcagtcatagctgtgattgttactattatattattattattattcctccctcaaagttgctccatctgggctggagacagagatggaccttttttcctttggacagagggagagagtggtatgaactcatcttagtagtatgaatgtcaaggtcaggatttgaggggggcgatgagaatgattctagggctccctcccgcctgcctccacttggctctggtgtgttcatttgccttcgtgccccccaacacacatacacgcatgcacacacatacactagcacagcccccgggccagtggttctcagtaaggtggagggaatgagtaggtgaacaaacgagtgagtttttcgcctcactccctggcactcggcaccgagggctccgacaggctggtggccagggctgaccagccagagtttcatctaaaagcctcgatggctatttttgggacaaatgacccaccacttccaatgacttgctccgaaatggcatctaatttcattaagccttggaaacagtgacatcacaagtgcctgcccggtagccgcccacatatggcgaaccacagagtgatccgagattcgtctgcaagaacaggggagaactaaggtcccaagcagcaaaagttaaaatagcaaagctgaggcattctgctatgaaaagaaattacagatgaaatccattagtcagacatttccagcggcagtttccttgcttgggagcaggggaagacgtgtttattcggggttgggctctgcagccattcctcactctgtaggcaagatgtggcccggaaagtgggtttctgttaaggaaatcctatgttctcattgacttttagcaccgaccttcctgtacattctcatggaatttgctgtatcctaaggcgtgaggaagctagagacgtggatttggcacctttttgattaacatagtgacacttgtacttaccacgcccttacagtaagtcacaaagtaaattcagacggacttcatcttttccctatgggttcctttgctttgttttttttccaagtgagcgctgccttctcaggcacagagcaaaaagggagggaaacactgcctaactccagattcttggtctccatggaggccatcaaggcggtggctgtgacatcacccatcgggggcaggagcagctggaggcccctcagagagagcatgggatcaatgggaaaccttctatgtgggaggttttattccgcacacaacagagcttcccagcctcaaccctattgacacttggggctggtcattctttgtcgtggggggaccttcttgtgtgccatggaatgtttagcagtacccctggcctctacctatgagatgtcagtagcaccccacacccagcgacggcccaaaagacaaatgtccactgagaggcaaaacctctccttacatgagcactaacaaggattgattggaaagctttttagtggcttgtgtttatttatttactttattatttatttattttttggaggcaaagtcttgctctatctcccaggctggagtactgcagagccgtgatcttggctcactgcaacctccacctcccagattcaagcaattttcctgcctcagcctccccagtagctgggattacaggcacctgccaccatgcttggctaatttttgtatttttagtagagacagggttttgccatgttggctaggatggtctcgaactcctgatctcaggtgatctgcccgctctggggcttgtttttatttttaaaaattattattattattttatttacttattcttgagacagggtcttactctgtctcccaggctggagtgcagaggcatgatctcagctcactgcagcctggacctccctgggctcaagcaatcctcccacctcagcctcccaagtagctgggactacaggcgaccaccaccacacccaaccaatttttgtatttttttgtagagacagggtttcaccatgttgccaggctgatctcaaactcctgacctcaagtgacccacccacttcagcctcccagagtgctgggatgacaggcgtgggcaccacacctggctttgtttttgttttcaatactctgagtttaattgcaccttcaagtgagcaaggcacacctcttcttgaggctttggctttctcttctgtaaagcgaacgggttggacacagtgatctcagaatccctgagagagctgaccgtgaggagcgttgagggcagggggccctatggggtctctgtttgggttctgccccagcaggggataaaccgcgtgcccagctagccccagtccccactcccattcccttgacccctggcatccaggttagtttttcttaagtccagttggttcctctcttgctttaattttggcccattttcctttttaaaaagtgaaaatgtggctggacgcggtggctcacacctgtaatcccagcactttgggaggctgaggcaggcagatcacctgaggttgggagttcgagaccagcctgaccaacatggagaaacctcatctctataaaaatacaaaattagctgggcatggtggcacatgcctgtaatcccagctactcgggaggctgaggcgggagaatggcttgaacctcggaggcggaggttgcgatgagctgagatcacgccattgcactccagcctggaaaacaagagcgaaactccatctcaaaaaaagaaaaaaaaaaagtgaaactgtctaagtatccacaaaagtagagaaaacggtacagggaccacggtgtactcaccgcccagcttcaccactgcccatcttatcttagtctcatgtttaaggctataccagtgggccttatgcttgtgcagatccattcatggactcagttccccaagggcctagactgggtagcgaggagggcagtagaggaannnnnnnnnnnnnnnnnnnnnnnnnnnnnnnnnnnnnnnnnnnnnnnnnnnnnnnnnnnnnnnnnnnnnnnnnnnnnnnnnnnnnnnnnnnnnnnnnnnnnnnnnnnnnnnnnnnnnnnnnnnnnnnnnnnnnnnnnnnnnnnnnnnnnnnnnnnnnnnnnnnnnnnnnnnnnnnnnnnnnnnnnnnnnnnnnnnnnnnnnnctaagcagtccaaatctttaacttttcttccaaatattttccacccaaaatgggcctgatttgtccccacactgtgggggaaaagcaacaggaccataaattagatctggattcagatctctgccgtggcacttcataggtgtgtgagcctagccaagtctccagcctctctgagcctcatctgtaaaatggaacaataatccctaatttgcaagtcagtcaagacaattagatgtgaacatgctggtcgaaggcctctgtggccctagtatatagcaggtttgctgtaagcacccctttccctcctccattctcttcaccctttcctccacattctcttgacggagagctggtcacaactggtcacatcaccgcagcaagggactgactaatgtcagccagggaggacggctcacttcctggtctgtcacatgcctggggttctcaccagcctcctgataacccattttcttagtgacattcatgctgactcacttggcttgtggtcagttctgaaactagggtctttttgagctctccctttaccccaccactgctgcccagcgtggctctgtggcgtgggaatggagtcagtattacagtacgtagtgttgaggtggccactcccaaggagccagaagctttgctagattggcagcttcatggggtggtgtctgccttgatcactttcatttccccactgtctagaacactgcctggtatattaggtgcttagcaaatggctgttgaatgaattaatgaattttgaactggtccctgtcttccaggtgactctcatctgctctggggcagcatccttggaaaagcagatgagcaaaaccatgagaccttcatctgatttaccaaaaaatgagctctaaactggtgattcccagagtacgggcagtggaaggaccatgccctgtggactcagacttgggtttgaatcctagctctgccactcactggcttggtgactctgagcttccattttctccctggaaaaatgagatatcagtattttccagggttttgtgagaaatacatgcaaatatgtatgtcaaagtgcccagcatagaatggaagtgattatggttaagcatcatttactctttcctttgattgccttctgtagctttggtccaaatctcacctccctcttagagcgtcatcatcgcccagcctgcctccctacccctgtccccatgcccagcaaagacttactctgcctgacacccaggagtcagggttaaaccagcacctaaacttcagcacctcaaattcaggtgcctacaaggaccagccatatgtgaagacaacaggctaagtggggtggtggtggtgatgatgatgatgattactattagagatggtggtctcactcttttgctcaggctggagtacagtggagtcgtcatagctcactgtagcctcaatcttctggtctcaagtgattctcccacctcagcctcctgagtaactgggattataggcatgctctaagtgtgattaagtggcatctctgtctttcatgtttttttaaatttccatttgaaatacttttttaactttttgttttgaaataatttcagacttttccgccaaactgcaaaaatagtacagagttcctgtatgccctttacccaagcatccccagatgttaacatcttacataatcacaataccatgattaagagcaggaaaatccattagacagtgctgccggccaatctgcagatcgtactcaactttcttcaggtgtcccctgatggcctttttctgatccaggatctcattggatttagttgtcatgtctctttagtctccttcaatctgtgacagtttccccatcttttcttgtgctttatgacctgagtgctcttgacaaatgccagccagtttttgttttgttttgttttgtttttttgtagactgcccctcactttggatttgtttgatgttctctcattgttagattgaagctgtaccttttaggcaggatcccccagaagtggtgctgtgccctcctcagtgcggcatatcaggaggcacagggtgccgatgtgtctccatgcttccggtgcccactgtcttcacctggttaagatgatgcctgggccaggcacagtggctcatgcctgtaatcccaatactttgggaggccgaggcgggcagatcgcttgagccctgtagttgaagaccagcctgggcaacatggcaaaaccccatccctacaaaaaaattaaaaaattagccaggcatgatggtgcatccctgtagtcccagctactcgggaggctgaggtgggaggatcgcctgagccttgggaggttgaggctgcagtgagtcatcacatcactgcactccagcctgggtcacagtgagaccctgtccctccagcccccatcaaaaagacgatgtctgccaaatttctccactgcacagttactctttccattttgtaattaataagcgttttctgggggaagtgctttgaaggtatgtcaatatcctatctttatcaaagttttgatttgttcatttctttatttctatgtatgttttatcctttctgttttatccaatggcttataatctgtgatgattgttatttattttgatgctcacattgtctattcttcggccagtgggaaccccaagttttttttttttttttttttttttttaaagacagggcctcaccctgtagcccaggctggagtgcaaggctcaccatagcattaaactcctggattcaaatgatcctcccacctcagcctcttgagtagctaggactataggcacacaccaccacgcccaacttttgttgttgttttttgttgttgttgtttgtagagatgaggtcttgttatgttgcccaggcttttcttgaactcctggcctcaagcgatccccccacctgggcctcccaaactgctggaattacaagcatgagccactgactgtgtctggcctcttcttgtccttttgacatgtccttttcattctttgaacactttcttggtttctgacataagaaggtgctccaggcccatcttgtatttttcctgcccagcctagaatcagccattccaaggagctctgactgctttaagtagagaatagtgattagaagccaaggtttgggtgctcgttacactcactgctattgggctgttgctgttgctggatcttctctatggaaagagctaggaaatgtatgtatatatgatacgtatatatacatgtgcatatttcagtgtttgggtatattgaaaatgattaattcatactgatatttccattaccactataataccatgttttcacctcccttccctgacagtgaggcacctggccccactatccttgtacatgtacatgtttgaccagtctctctgtatgtaacaatctcctatctctctcttcctcaccctgactgaacttagacactctgccccgagccactgctgcctcctcacccagagcagcctctgacttccagttttgaaacaatggttcttatattttttattttttaatttttattttatgtatatttttgagatagggtctcactgtgtgacccaggctggagtacattggcaccatcttagctcactgcagcctcaacctcccaggctcaagtgatcctcccacctcagcctcctgactagctgggactacaggcgcacaccaccatgcccagctaattttgttcattttttttttgtggagatgaggtctctctatgctgcccaggctggtcgcaaactcctattctcaagcagtcctcccacctcagcctcccaaagtgctgggattacaggcaagagccatcgtgtacagcagtttctgtatttttttaaactgcgaggcccagtttctgcttgtcggtccctgatggtgacctggacaaaagctgggctgttagccacctggggtatcgagccccaggacacggctgtcatgctttaatctgcatgggaacttttagatcccctgtgcaccccctcatttcatactcagagaagctgaggcccagcaagggccagggattttctgaaggtctaacacgaagttggggtggagtgaggacgagacccctcccgctgcagccctttcctgctgctcatttctccagtcttaggagaacccacatgccctccccactggcccaggctggccttcctatgacacgaggcggaccacatcctcttccagctccgcaaggcctctccgctcaaatggtcaccgcctaggccccaggcctcatgtcatctgcagacgcgtctcatttgtcctgtagagtgttggcccagcatttgagaatggtgaacttccatgtaaaattccacatttttggcttctcttggacactcagaaggtctggcctcctgagcccgcatctctacctggcaggtgtcagctggggctcggtgatggccccctgctggtttgttttctctccattccctctccccacccctacctcccaaatttgctgacctctcacagtctcccacagtagaccgcccgccggcccccatcgacacttggtgtgagactccctagccacagcctggccctcaggaccctctcctccagccccgccccagttttccgtcctcctctccctgcacatcgggctgtaccctgtgccggagagaggacagcgcccagcttcccagattcggtcctactctgtctttgcttctgctcctctccttgcctgggctgctctttccctccacccatccatcttctccccctcctgctctgtgcacacatcaccccctgtaggaagcttcaccgaggaccccaggccaagtcaggtaccccctcctgagttaatccagcacctcgtgatgaggatgccactaccttctccttccctttctttgcctctaccgctaaactacaaactcactgggccaagggttgatttttatctccttgcctaagggcctaaaagagggggtgtgttagtaggcactgcgtaaatgtttgtcaaacaagcgttaataataatagtaaccacaaatatccacgtggcatttctggggtgccaggctctgcctaagtactttatatgtgctcagtcatttgagcctcaccaccatgctgtgagatagttactgttgttgcccccactttatagacaaagaaactgaggcacagagaggttaagtgacggtcccagggtggtacagtagtggtcatagttgagcccaggcatctgattccacagcacatgctcttacctctcacacacctctcagtgttaaagcggcccccactttctgactaagggatatgagtaaatatggacaggtgagttgcagagacccccaacctcccgaccacaccccagccccagcttctagtaccctcaggggcacaagcacaggtgactgggagctaagcaggcggcagagaaagtggtacctttgaacttggcagcccgcaggaatttttctcccctgaggtcttaggaaactgagcatgtttcacgtgtaattagggtgagcacactgattcaagcatcggcccttacgcaaggtttccaaggcattgcgtcgggtttagctgggcatactcttgtttcccaatcaccaaagaggaaccgcacaccagcctgtcacccccaagggctggagccgccggcctctccagcaagtcaagttctgtctgagagctgggatgccgtgtggactaaggagggttctgtcgatcaaactctgctgtgggagaactgtctgctacgcaggttcaagtgaaggaaacgaagccaagtgtgtggggagcctcccctgcgagctctctgcgtcacatcctttacagacacttctttccctcactcctttccgtggcctcacagggtctagtactaatggtcccatttttacaaaggaggaaacaggctccgagaggtgaagtcgtttgctgaaggtcacatggtgaacgagaggaccagccgagatttgaaccagggtagtctgattccagggtcttaactcttaaatagctgaagcagagccagaattaaacctgtgtctgtctgatttccaaaaccctgaattctcccactacaccacacgatttccctgtgctctggtgggatccataggaaagaaagacatctgtctgcttctgtgagggaaagaaatcacacaagacaggaaccagagccatcaccagctgatgctgagaccgtgggctcctggcaggactttctgttaacctcatgccttagcattcttaagaagagtctccatgaggcagacagcaggagctggggggtgcagccggagtggaaacaggaggaggcaggaaagggaagagggggaggagaggtgacgtggagcaagaatgcagcatcgtcacataactcgagcagggctgtgcgtttccttgcttcctctagcgtcagagtcacccccgattcaggggttccatacattccataattatccagtgcctactctgcaccaggcccatgctagggtttgggaacgtggcagggaacaaaacctaactaggcccctgctctcgcagaagttacactctgatggaagacccaccgatgagtgggagggtcatctggtggttcacgcctgtaatcccagcactttgggaggccaaggtgggcagatcggttgagcttaggagttcgagaccagcctgggcaacatggcaaaaccccgtctctaccaaaaatacaaaaattagccaggcatggtggcacatgcccgtagtcccagctacttgggaggctgagacacgagactcacttgaacctgggaggcagaggttgcagtgagccaagattgcacaactgcactccagcctgggtgacagagcgagaccctgtttaaaaaaaaaaaagaaatgttatgaagaagagatgacaaggggatgtgatctaagggtgttgtggggagcaggggttccatcagagaagcatcttggagaaagtgtcctgaaagagcagaaaaactgtgggaagaaccatggtttgttgaaccatgtgtcacacaagccagcaccactgcctgctgccttgagacccaccctttgtgcccacctcactcctgttccatttgctctccacaggtttgacatctacaggaaggtgcccaaggaccttacgcagccaacgtacaccggggccattagtgagtagccaacctctggccatgccctctgccccatctccactgcctgtgcctgctctctctgtgcagatcatctgggccagggaggaaagaaggaaagacaggagggaggaaagaaatgctgagcatcttgcgggggcccttcaagcatttcctcacttactctctatcctcactgtaacccctcaaggcacaggcaccatctggaaggacatgaaagaaattgtcaagagtagctgccaggctgggcgcggtggctcacgcctgtaatcccaacactttgggaggccaaggcgggtggatcaattgacatcaggagttcgagaccaggctgaccaacatgctgaaaccccgtctctattaaaaatacaaaattagccaggcatggtggtacatgcctgtagtcccatctactcgggaggctgaggcaggagaatcgcttgaaacagggaggtggaggttgcagtgagccgagatcacaccattgcacttcagcctgggcaacaagagcgagactccatctaaaaaaaaacagtagctgcccctgggagaggaattgggcccaggggtaggaaggagatttacttttctctttataccttaaaaatgatttgagttttccaccaaagcatgtttttatccattaaaaaaaaaaatcacaatctcatccagactttgggttctaaagaccattcttcaataaaaggaaccatggctccttggagaaatggctgatttcagggctaggcagggtaaagatagaggagcctggagtgcctggtgtcagcaggacctaggagccaacttgaaagtcagcctgcagcagtttgagtaataaaataaataatgacattattggcttagaagccagagaattaagaaagagttctgtgggtcctaattgatatcaataaatgggggagaagagacaaatccattcagaagaattccaaataatatacaggctgagtatctcttatccaaaatgcttaggacaagtgtctcagattttggatatcagattttagaatatttgcattatacttatcagttgagcatcccacatccaaaaacctgaaatccaaaatgcttcagtgagcatttcctttgagcaacatgttggcactgaaaacgtttcaaattttggagcacttaggattttgggttttcagatttgggatactcaacgtgtatgtagctattctcccatccaggtggtggagtttaattcccctctcttgagtgtggacttagtaactctatttcaaagaatagagaatgggaaggaaaaataaggcctttactgaggaaatatggcaagtgccagtgaggaaccaagtgagaaaggttggcatgaccagtgataagccacgtgcatatcgtgagcccctgataggatgcatggaggcatcttgcctccatgggatcgtaccaaaaaaccacagttcagtctaatcataggaaaactcacaatcccaggtcaggggacattctataggatacttggccagtactcttcaaacatggcaaggccttgaaaaacacaaaagaccgaggaactgtcactgataagagactaaggacccaggatgaaaatgcaaagtggactcccagatcagttcctggaacagaaatctggagtttgtgggaaaactggtgaagcccaaataaagtccgtagccaagttcatggtactgtactaatgttcaattcttcattttgacaaatgtaagatgctaacataacgggaagcccagtgaagggcgtatgggaactgtctgtactacctttgcatctatgattattctacagtaaaaagttttaaaaacaaaccaaagccaccttgcaaacaggggatgctttcgcctcattttcccaatgagaaaatgagctgagagaggtgagctgaaatttcacagctcacagaagatggagccacgactcatactcaggtgggcctccttgcaccccacaagcccccctagtgcctggtgtgggagagggaactgcccccctgatggtcccagccctgctgcctgagcagggtcctgggccgggcagtcggtcatattggagtccacttctcccaggtcaggccattctcagttgggggaggaccttggggatccggctgggcttgttgaagctgcaagatgcctttgagagccctgaggaagggacagcacagccccgtggcaggatgcatgtcacacaggctctgtgttcgggcagagcaaggttcatcctcccatttagcagcagtgtgactgagcaagtcactcccctctctgagcctcagtttcctgatctggggattaaatgtgtcccgggatgtgtcttgtgcagggcacgtactaacccctcagtgcatggatgactctccttttcttctcactgtcctcccggagcctgcaacacatgagggcctgtggcctgagaagctgtgcagctttgtgccttgactcccgaggaaaggatatggaggggaccatgagaggaaagagccttggtagtttatgaacctgatccaaaaaaatcaaatgaggcttcctgccccattcctaccgtccaccagtggctccatcctcttccctcttctccatctctgcagtctctcccttgtctggtatgtttaacagtcaggtgtgtatttttctagagttttaaaaaatatatttaggctgttttttttttttgagatggagtctcgctctgtcccccaggctggagtacagtggtgggatctcggttcactgcaacttctgcctcccgggttcaagcaattcttgtgcctcagcctccccgagtagctgggactacggatgcccaccaccatgccaagctaatttttgtatttttagtagagacgaggcttcaccatgttggccaggctggtctcgaactcctgacctcaagtgatccgcctgcctcggcctcccaaagtgctgggattccaggcatgagccactgcacctggcctatttaggctttgatatacctatatcactgtttgaaacacaaaagggagcatactctgcacactgttcttcccctgcctttcttctgctgatacatcctgggcacctttcctgccagcggataaacagccaccacattcttctttccagctgtgtcacattctgttatctggctgacctacggggcctgtggccagcccctgagggtagacattccccattctggtttgttggagatccttgtccatatctttttgtatccttgtacagttatttctgtaaggtaacttccctagaagaggaattactgggttaaagagtatggtttttttttttttttttttttttgaaacttacaaggtcctgccaaagggccctccagggacatggtctgatagacagtttcagccacagcacaggagacagcaaatttccttacacaagaggaaaggcgtgaggcataggaagccagcccttagctaccatttagtgaataaatatttattaaccaggtccttgggccaggcgccatgccaagccctgggactgtgctgatgaacggggcttccatctttgtccttgaggagcacacgactgggcagggcgggctgacttggacacacaccatttcattactttgtgatgggtgctattaataactgaaggaaagatcagggcattggagacttacagctcagggtttaaatgttgcctcctccacttacgtgactgtgtgaccttggacaaattccttgacctctcggagccttgggtctcaggtccagtgccccctttggctggccgtaccaggtttcctaccatcaagccttctcctggggtcacattcctactgtccgatgcctgagtcagtttcagaagaagtctggagttagagagccttagagtcttgcccaaacatggactgaaaaaccttcatcaagccttcagtatcagaaggcctttctggttgaaatagtttttacctcctgttgtgttttttattcattcattcaataaatatttattttataccttctctgagccaggcactgtgctagtctctgaggccacagtggcattgtgacctggtctctgtcctcctcctctatctggggtaagggtaacacacgccatgaatgcgtgtgatcgggacctttggaccacttgagtctctgccgagtagacttggcacttattgtgtccacctgctgggctgaccaggcttagtccgagccttgaaaaagcacacagatttcaggaggcctttccatcccatccccccggctctggtgctctggtgtggatagaattagaaccctgggacacacgtctacaagcatgaacacggaaagtagctaggagacctgaacccatccaagttagcaccgaccttcatgaacacatcctgttttgtttcgttttttttgagacagaatttcactcttgttgcccagcctgaagtgcaatggtgtgatctcggctcactacaacctccgcctctcggattcaagtggttctcctgtctcagcctcccaagtggttgggattacaggcgcctgccaccgcacctggctaatttttgtatttttagtagagatgggttttcaccgtgttggccaggctgttctcaaactcctgacctcaagtgatccgtctgcctcggcctcccaaagtgctgggattataggcatgagccaccatgcccggcaacactccctattttgtgcctgttcatcattacagcatccaatgggttgtcggggcttgggggaggagggtgtaaaagattctgaaatgtgggtcctatatgatcctggtcagaaagttgcaagcttccaaagcaaggatgttttgcctgctcagttttccaagaggtttaatagcctcagtttgcgggtgagaaagggaagaacaggagccaggaaatttggattgatagctgatctcttccagtggatttgttcagcagctggagaaaacaatttgaaatttatctctctgccgttcgaaaatgaaggaaaacacggccactcagtaaactgatgtggaacctgtttcgacatagattgctgagtgagcaaagcacggtggaaaagagtgtgcccattacgctgctgttcacttagggggatatatatatatatatatatatatatatatatatatatatgtgtgtgtgtgtgtgtgtgtgtgtgtgtgtgtgtgtgtgtgtgtgtgtatatatatatatatatatatatatttaaatgtccatggatggacacatgaaactgtaacagggaatcgggggctgcagatcaggagagacagactcactttttttatacagctggatttttttttttttataatacgcattgttaactatttttttctttaaaaaatttttttttctcactgtcttatggtgctgatgatacttttttttttttttttttttttttaagtaaaacctttgaatgcttccccggtacaactttttctttttttttttttttttttgagacggagtcttgctcttttacccaggctggagtgcagtggcacgatctcggctcactgcaacctctgcctcctgggttcaagtgattctcctgcctcagcctctggagtagctgggactacaggcgcctgccacaacacctggctaatttttgtatttttagtagggacggggtttcaccgtgttggtcaggctggtctcgaactcttgacttcgtgatccgcccgcctcggcctcccaaagtgctggggttacaggcatgagccaccgcgcctggccaactttttcaaagtttgggagaaattgggagtaattctagtatcccccatgtctcagggtggttggagagactcagtgagcagtctggggacatcctgcccttcactcggagcctaagttcttgaggttccttttctcagggctttgcctctaaaacatatggcttccagtcctgcctctcctgcccccacacagtgaagccatgggccagcctccttgtctcactgtgcctccatttccacacccttaacatgggcaccgcccccctcaaggtggtgggagtgtgaagtgacaggacatctgttaatgcagtcacaacagggcacatagtaagtgcccagcaaacactctctttcttctcccttccctcggaatgcatctttggctgtttgttttgaagacagatagatggctatttgctttgaagatagatcaatcaatcgatcaatgtttggctgtttgttttagataggtagataggcagatcgatatatgtaaatagatacagactaagaaaaataatagagataactggctgtcacatccgtgacgctggctctgccagtccaggtgcaggctgcggagaatgcagcagaatcagcaagagggattgggaagtcttctttgcaggaaactaagggtcaatcaatgtgttgaatcactttccccagatcaccaaacccttcccacatctctctgatgtaagtcctactcatgagctgatgctcaggtaattattacctgccgggctctgtttcaagctcaatccttgtgttgttgagatcctcagagaagccctataaggcaggtactaccattgctgccatttacaggtgaggaagtggaggcacaaagaggttaagtaactcacttagggccatgcagcaggtgagcagtggggccccagcgcagtccttagtgagctcttgcccactaagtgcctctgggataaactcaggtgtggcgtattcagccctcattttgtatcctgggagctgactctctgccgtacacaatacctgttaggccccagccccaggccaggcactggaactccagagtatttgtctttctggatatcagtctagtgggagaaacggccacagataaccgataaaatgtgggacatgttcaagcagaggctgggaacacagacaaaagagtgaccagctccacctctgggagtaggggaagcttcccatcaaaagggacatgtgagtcgggcctgggaggatgagtaggagttcagcaagcagagaggataaccatggaggaggagggatgatgagtccaggcaaaggaacagaaatgaaaggcatatttagggaatagcatgcagctctctgtgggtgggtggttagacattgtggggagtgtcaggagatggggctggtgagtggagttgagggccggactctggggcacttgttatgtcctgcccccaaggagtgactccaaggtccacaaaccccagtgtctttaggtgccaggcagatgagagaaagacaacagacatggccgaccccagaactctgttctacactctgcattttaaacatattggaccggccgggtgtagtggctcacacctgtaatcccagcactttgggaggctgaggcgggcggttcacttgagatcaggagttcaagaccagcccggccaacatggtgaaaccccgtctctactaaaaataaaaaaattagctgggtgtcgtagcaggcacctgtaatcccagctacttgggaggctgaggcagaagaatcgtttgaacccaggaggtggaagttgcagtgagccgagattgcgccactgcactccagcctgggcaacagagtctcaaaagtaaagaaataataagcatattggaccattcttcacttccataaagaattatttcttctcttgaagcaccgctgtctatagccccttctaaggacaggggcaccgtgtggatggcaccacagagggtggtgagaaacagccacagactctgcctcagcctcagaaccagagaggcagaagggagtggtggggcctgtggcaaactcatgggctccgaccctccgtgggaacaagggtgagatgttctggagaagccagaatgctggccttttatgtgaaatctgctgactgttcaaggtggactccagattgtgaaatatgttgtcactcgagccaaacagaacacatttgtgggccaccggtttgcagcctctacttttggctggcctttgcattaaagagctctcctggaaggaagcggggccagccccaggaggattgctcatgtcggcaggttgatccacacctggaggccagaccagtaccccaaaggcagggggtggggctgcttcatattgaggctcgagtcagaaggggctctggagggtctgtgggcacagccccacacccttgtcctggggcctctttcctcttccctctaggctggtctcccttcgtcagtgcccaccacccttaacagtttgcatttctgttgtttcttccagtctccatctgctgctgcctcttcatcctcttcctcttcctctcggagctcaccggatttataacgacagaagtgtaagtcatactttcccgatggggcattccaggatgttctgggaccccagacaagaagagggaggggtctttggccaggtttggtggctaacacctgtaatcccaacactttgggaggccgaggcgggcggatcacctgaggtcaggagttggagaccagcctggccaacatgctgataccctgtctacactaaaaatacaaaaattagctgggcgtggtggcgggcacctataatcccagctactggggaggctgaggcaggagaattgcttgaccctgggaggcagaggttgcagtgaaccaagagtgcgccactgcactccagcctgaatgacaaagcaagaccctgtttcaaaaaaaaaaaaaaaagagagagagaggagtcttaaaaaggagagcaagttccaaaccttccaacttctgtctccaggcctgtggcatcggttgctcttctgtttcttaaaaggactttaaagtgagagcaaaagtgaatattgccttgttaaagctgaagggaacattttggttccattccgtgggggttctcctgggctcaaagatgaacagaaataatttgcacatctctgccatccctttgtttggccagtgggctttttttccctctgaatcatcacagggtcatttgatgtgagagccgaagagttcagtgaaactaatgggtacagcttcctaccggagggggcgaggttgctgacatcagcgcccggccccctggactaacccccttcccatttctcaggcccacacttggtgaggaatcggtgcaggcttcctggcagtggctgacgcagagttaatccattcctgattcctagaattatctgttgtctggataacctagtaaacgctctggggtgtgtgtaacagaatgccattagaattatgcagtcacgacctcatcggacgcccctctgtgatggaattagacccaggagcttcctgcctttggcactggcttgaggcttcaaagcctcttcatttctgtgtttacagcccggaaagtcatcacggagctgggccctggccacccactctcctgctcaacactggaattttctttttcactaatgggatttcttggtttcctttgcctccactcagccacaagacaataggaaactaaatacatagctgcttagcccaagaagactctcattatacaagcattaccacctttagttctcaaacagcctcaggagggagctgccccctctttacaaagaggaaattgaggcccagggaggtggagggacctgcccacagccatacagttaggagctggctcccagccctgcctatctccctagcccacatgtgtttgaccagcacactgaaaggcctatgagacaggagggctggtctcaccttgtttctgggtatacctttcagccctcccctggcatgggagagtttgcctttcctggtcactctgatcctgttttaaccctgatggcgccaaagcccaggggaccttttacagtggtgggaagagtacaagataaggcattgggagacccagggccaggtctctgcttaattactactttgctgtgtgaccctatgcaagttgccgaacccctctgggtctcagtattggtagccaaatgaaggagagtagaccagagtcagagctcccttccagctctgggagaggttggtctgcttcccaagacatgaccctgtggccatgcagggttcgaagaaggggttttattccccccaggcctctaatgggagatggccatgtccaagtcaagcatcttcccctctgtacaactcagtcactggacatcttaggatcaccctatcatgaatcagagctcgaagcagggagagcggcaagaggttgagacttgctaatgttatgaggtacctgttgtatgccaggcacccactggcctctgcaggctgtaccccaccctctaggaggggacctgcttggcttggcaggcctgtcatgttctgagcaaggtgacagaggcacacatgtgtcatctgctgagaccaggcaccaggcaggtggctttatgtgctgtgggcaggacaccagcaggtgcaaagggcctcaggcagggatgacctggtgtatgtgaaggcaggaagaaggccaatcagccaggtcaaagtgagcaagcggagagggtaggaggtagagcaggcaggacggagaggggccaggccttctgagctgccaggtagaattgggagttacttctttttttttttttttttttttttggagacggagtctcgctctgtcgtccaggctgtagtgcagtggcgtgatctcggctcactgcaagctccgcctcccgagttcaagagattcttgtgctttgcctcctgagtaactggaattacaggcaagcaccaccatgtccagctaatttttgtatttttagtagagacagcctttcaccattttggtgaggctggtctcgaactcctgacctcaaatgatccacccgcctcagcctgtaatcccaggctgggattacaggcgtgagccactgcgcctagcctgggactcacttcttgatgatgagctcgtggagcccagggctggacctgcacactcactgctctgtggctccacacatggaggagctgaaaacgccagtggtagacacagtcaacaagcaaacaaaactagactgtatcgatcaggggcaagtactccaaagacaagaactaaagcagggcaggaggtagaaaatgagatggctgcaggtacatgatattttatgaggatcaaacaagattatttagctgaaagctaacttaatatagtgcggctatactttaatatcataaggtccatatctcttcgtgcatttattcatttcctacatagtctgcatctaactctaaaaaggttttaaggccgctccgcaccaggcatataagtactcagggaatgtgaattccttgtcccctcttccgctttgagttaagaagatgcctctcttgcctgctgctgacagcgtgtggggtggcattcccagctcatcccacatgaggtggggcactgaggcaatgggctgccaacaagtgagttttgacgtcacagcttgaggctcgagcaggtggggccccacccgcagaatgcccgggagcattggggaagggcccttccagcaagcccagacaactcatgcagcttcccaagggcagggctgcttctttctgaagagcacagtgtgttcccactgctccccattcccccgtgccaggacttcctctccctctctcccagcggcaccccggacgctctgatcccaccgagtccctggagaggtacaaagcttagggatgaggggaggaagggggccaggtgcagtggctcacacctgtaatcccagcactttgaaaagccaaggccagaggatcacttagcccaggagttcgagaccagcctggacaacacagtgagatcctgtctctgcaaaaaaattttaaaaacattagttagccgtggacacacacacctgtagtcccagctacttgggaggctgaggtgggaggatcacttgagctcaagagatccaggctgcagtgagccatgattgcaccacggcactccagcctgggagacagagcgagaccctatctcaaaaaaaaaaaacaaaaaaaaacatgaggacattttttgagcatttgccttgagtccaaccctgtgctaagtcagcggctggagagagggagggaggcagagatgaatagagagatctgtccggagctgaggccagatgctccagctatgaagatgcagtgaccctaatgtccccttccctccttactaaggtataggagttgcccgaagggcctccgcaggatgagccctaagacttacagagcaatcgagaggagaaagcatcacatctttggggtcttccagttgtcagaagcttgtggcccccaggaagccctacaggtttgggaacaactgaaggtcacagttctcgtcttctgggtggctggccctctgtggcaggtttgtggccacagtggggtcagtgccccctcccgccaccatgagattgtaacttaaggaaatgaggtcaccgttggttggatcaacatggctccagccccagcctgtggttatcagtgacataagacgcttattctggcctgggcctggtggggggtgagggggaggcacatttgtttgggtggttgggctccaacctggctttggacaggccgttaattatccttgggaaagaggccccacagagtgttctgaaactccgtgttttcagggagcaggcccctcctcaggcaacctggccacagaatgttccagcctctgactgcccagtctctgactgctctgaataattattaacctcatgaggatttatactaataaaatatagtaactggaactctccactgatagtttataatgtaatataactcatggtaccttccatactataactcatggatttatagtgtgcatgccaacacctaggtcagcactttatttttatttttattttttgtttgtttgttttttgaaacagggcctcattctgttgcccgggctggagggcagtggctcaattatggctcaatgtagcctcgacctccagggcgatccttctgcctcagcctcccgagtagctgggactacaggcatgagccaccatgcctggctaattttttaattctttgtagagacaggggtctccctgtatgttacccaggctggtctcaaacttctgggctcaagcaattctcccaccttggcctcccaaagtgctgggattataggcatgcaggctgcccccggcaggtcagcacttcatgatggtcatctcattggtcatcgcagaaccccttgaggcaactactactgttcaccccatgttacagctggggaaactgaggcaccaggcggccaaaaccacatgaagcagtaagtggtgtaactggagtcaaacacgggtctgtgatgctgaagcccaggctcagcacctcccctctgttgtaccccacttccctggccccagcatttcagggccccaggctcatgggagccactgctttttgatcagaatagttgactggaggacttggatgcacccttctagggtgaggtggccaaacaggcagatggaagcctgggaggtgggagcttggaggtcacctggaggtcacggtgttctcacaggctccccgtaggaggcccggagtggggagcagtggcttaaccaggaggaggagctggaagtctccaggttgcctgccttgagcctgggttgtgagccaggctgggtagagggccccaggcatcccattaaggagcatgaaggacattgctcttagcaataggaggcctgagggcgtctgagtgtggagtgacgggtttatgtctcagacagctcaccccttgtgaagatgggtttggtgtggggccacccagaggccaaagccctggtgggagctgggggatgacccaagtcagaggggccgagggtgctgggactttggctttggagcaggggtgggcagaacccggtgactggctgtcgagggatgtattttagacatccacctggttggtaatagatgcacatacttttacctggacgactcaggatttgaaactcaaggctccggagcgcgtgcttgcagaatctccatccctccctccaccccaccccaagcccttgcggcaggcctcaccgccgcctaagtttccattcgatcaaattttgaagcatagaggtcagagacttcaggcaggaatctgaactatttaagtgctcttcaaaaagcaaataaaattgttttgtatagatgtcatcgaactcatgcctcagactagaatttcaaggccctccaccacattccatttacactccccccacccacacctccccaggcccttgcgtacctctccctacaaggccactgtccacccacacccccaccctcccacgcactcgcctgactccctgacgccatctggcgtcccccacctggaatgtgctcccgactgctccaccagcgcgtgccttccctgcatcctgggagttctgctgaggactccctcctccactcaggctcattccactgaagtttgtgagcacacgctctgtgctgaggctcagggagccctcgtcctgggggtgttgacgggagtgggagaggcttgtgggacagacgcaactggacccctaagcacccctgtaccctgcaggcacctgggccctggtgggaggggacacacctgaagattatgaaaaaggactaggatgcctgcatcacatgtccactgagggccaccggcccctcagcttttcaccgattcccatcccatccaggcagtgcaatgccttggaaagagcatgggctctgggccccctgtccctgggctcagatcctgcctctgcctcctcttggtcctatgatcttggccagccagctgtgctcctctgagcctggtttcatcgacgtgaagggagaatagtacccttattaaacactggatcaactccttgagcatcgatattaataataatgataaaaaccatggacatttattgagcacttactgtttactaagaccacacttagcattgctcttgttctcatttgatcttctcagcaaccccatagcaacccctatgattgtccccattttacatctggggaaactgatggatgggaagccccttgcccaagtcaatcagccaagaggtggcagagccaggattcgaaccctggtagcctaggctttgaaccctggtagcctaggcttcgaaccctggtagcctaggcttcccctgcactgctgtattttctttaccaagaagggtgtggaatcggccctcaagagagagatgagtctcacacatacacacacacacacacacacacacattgactcacactaacatacacacactcactcactctcctgccctggggcagccaacagcttgacttggcagtcatccagcagccctgtgaagtagacggaatctttatccttattttcctctttttctctcctttcctctctccctccttcctttcctttcttattttcttattttagtgaggtatgtgtaacttacatacagcaaagcatacaaatattaaggtagaggcctgatgaattttcacctgtgtttacacacgtaaccatcactctgatgaagacataatacattctgtcaccaaagaagggtcccttgagcccctcccagtcagtagcccccaccactattattctgacttccattgccatagattaattttgctgattttcgaaccgattgaaagcttttccagttttacagatgaggaaactgaggctcagagaggtgaagcagtgtgtcctaggtctcccagctcctaagtggcagagccaggaggtgagcccacaccggtctgccactgcccccataggccttcccactgcccacactggtgacaggggagtcaggcccatggaagtcctcaaaccacaatgaatccacaaaaaacatttccttttcttccaggtgggttgatttctggcagcccgttggccttttaaaatcagttcagccctagccaatgaagttagttagccttggcaggcccctgccatggggtggttgtgggtgagctcgtggcgctggctggggtggcaggaagccagcagccctggaacatttgccttggacacgaaggcgaaggcggctttattgacctcatcaggcagcccaggtgattgaattgtgtttatctcacagcctggggccctccaggaaggagcctgggagcagccagttctggccttacataaccagtctggccagagcgcctcaggccgtccctgcccagcaccgcagcccccttgttctgggtggccctctagccctgcggagcctgttctctgcttattctggttaggaagacagggacccacgcctgggagaggcttcttggggccttgtgggtgagctcaccttggcgccacacctgggattcactttgctcttggctgaggtcacctccagagggttgccagtggatgacatcatcccacaatccctcagtgctgtgcggaggcccagcctcgccaggtgggaaaggtgagttgcttcaaggaagagtctcaggcagcttcctggctgggaagggaagcccaggctctccttagttgactgtgtgttaatcacccagcaatttcattactcaacagctctccagagttgcacattacagctggggtagaaattgggtgctgaaggccaggcagagcatttggctgtagggaggccgatcctcctcgggcctgttaccggcgggtctttgttcttagacctggggttcttggcctcacggattccaaggaatggaacgttgggccatgcggtgagtgttacagctctattggaagccgtgggtcacggaagagaactgtggaacccagcgactagtgtgcagctcatttaggacaaacccgggcacttagccacgcaggaacaatggccagcctctagtccgatcaggagcggcaatgggagcctcgctgaataagcacagcggacaccctgccggatccagaggggtggaagtcagcggtgggtctgtgacgactgcgatcagcaccacgagctaaagctcagctcgagccggaacaaacacagaccagaagagtgtgtagttgcaagacttaatagagtgaaaacagaactcccatacaaaggagggaccaaaagggggttgcccaatccagctcgaatgcctgggtttatatccccatcattgtccctccccctgtgctctcaggcgatagctgatttgactgtttctttacctcctgcttttagcctaattggtatttcagtgagctccctttactacctgattggtcaggtgtgagctgagttagaagcccggtgtttaaaggtgggagtggtcaccttccccagctagggttaggaattcttatttggcctaggaaatccagctagtcctgtctgtcataacctcctgggctcctgtttgcctctctccctccagctcctttgctcttggtggcctctgattggggccaacactacaagcaaggtcaagcgcaggtccgtgtctcccctctcccatcctaaggcttcccaggaccagggccctccttcattttcttccttgaccctgatgctgaggagagggctgggaggcagcctgagctgtggaaaggctgggttgagattctagctcggccatttcctagcatgtgactccggggatgggacacaccctctccgagcctgttccctggttttaagatggggctcagggcatttcacaggcgcacatgggacagcatgaatgcacgtagtaggcctcccccagcttaacgagtggaggcccatctgttgcactcttgtctctgggaatatccttgtgggccccacagagaagccccaggtgtcttttcagagcccaccgttccttgtgaacagcatcacaccgggtgctaggggcgcaaagatgtggtcttagtaaaaacgaaattcctttgccttggtctgactcattctttccctaagatgtggccatttacaaagctctcttggagtcttcattgcttagatagggcagttctcttttatttatagcctagggactggacccaaggggcctaataaatgtttaaaataaccacagcccagccacctgaagcactgccccttcagccgccccctaggccaggcctttagatttggttccctctgggtggggggcattatcggggaatcagatgcggccatcagacatccagcagctacttggggatgcctcaagacacctgggctcagcacagcttctggcactcagcacctctccctcctgctggtcctgttcctcttccaagggctctcagcccaaagaatgggtccaggaagaaacacagcagtgtgtctgcattcccccctcacctcaccctcctccgcccagtcccatccatcagcaagtcccgcctgctctacgtgggttcctacagccctcctcctctccattcccatcccaccccatccaaggcgccgccatcccctgcctggtctccctcttgcacagcagcccctccagtgggtcttccttgcagcagccagagggagcccgtgtgagtgggagcctgaccccgtggctgtgctcatatcaagcctaaaggcctcggccaggcacggtggctcatgcctgtaatcccagcactttgggaggccgaggcaggcagatcacctgaggtcaggagttcaagaccagcctggccaacctggtgaaaccccacctctactaaaaatacaaaaattagccaggcatggtggcgcatgccagtagtcccagctacttgggaggctgagggaggagaatcgcttgaacccgggaggcggaggttgcagtgagccgagatcgcgccactgcactccagcctgagggacagagcgagactctgtcaaaaaaaaaaaaagtataaaggcctcgtgcagcctccttacactgcaaccacggtgaccttcattcagttccccaaagcagccatgccctccccaacctccaggcctttgcacatgctgccaggatgatgcctacgcatcccccagacctcaatcacacctcagagaggtcttcccagccccttctccccaaaggtcagtggccctgtagtccctgtcatggccccctgcagctttctgtcaagtactaatcagcgttgggggtggcagcatatttaggggctgagtgatgtctggttcttgtgtctataagcttgcagaaggtagagacagcatctgtctgattcattgctgcttctggctcctgacaggtagtaggtactcaaaaaagtatttgttgagcaaatttggattgctaacagatgccaacactgtgctgctgacagcaaggtgacatggctgtctgtggagccacctgcccctaaatatggccgatgcggtcgacagaataatgaccccctgccccctgtgatgtctaggtccctgtccctgatgtgtgtggccgtgttaccttgcattcaaaaggaactttgcaaatgtgattacattaaggatctcgagatggggagaggatcctgggttagccgggtggactggatgaaatcacaagagttcctgtaagagagaggtggaggccaggcacagtggctcacgcctgtaatcccagcactttgggaggctgaggcgggggcgggggggnnnnnnnnnnnnnnnnnnnnnnnnnnnnnnnnnnnnnnnnnnnnnnnnnnnnnnnnnnnnnnnnnnnnnnnnnnnnnnnnnnnnnnnnnngggggtgcatcatgaggtcaggagttcgggaccagccttgccaatatggtgaaaccccatctctactaaaaatacaaaaattagctggagtggtggcacgcacctgtagtcacagctactcgggaggctgaggcagaataattgcttggatctgggagatggaggttggagtgagccgagatcgcgccactgcactccagcctgggtaacagagtgagactctgtctcaaaaaataaaaaaagagagaggtggaggtcagagaagggggaagccgctggctttggaactgggagaaggggccacaagcctaggcagcgcctagaagctgaaaaaggcaagaaaatgcattctcccaagaacacagcccgttttagacttctgacctccaaaagcgtaagacaataaatgtgtgttggtttaagccattcccgttgtgataatttgttacagcagccacaggaaattaatacagccgtcaagtcgtttctcagaaccggttctgcccctacggatgggcatcagggaattcctggcttcccggctgggggaaggggacctcaagagaggaggctgtaaggtcctctgtgcctgctggcgccaggccctgatcccttataagacccctatttctcattttagtgttcaaaccaccttattcgtagtgggtggtgttatccccacttaacaggtgtgttcacagaggtgagcataggaagtgccagaaccagaatttgaacttgaatctgtctgaaagatatgctcttaccaccgtgctatctgaccccaccccttctctttcctgagccccagacctcccctcttttttttttttttttttgagacggagtttcactcttgttgcccaggctggagtgcagtggcgcaatctcggctcactgcaacctcagcctcctgggttcgtgattttcagcctcccaagtagctgggatttcaggcatgcgccaccacgcccagctaattttgtatttttagtagagatgaggtttcaccatgttggtcaggctagtcttgaactcctgacctcaggtgacccacccaccttgacctcccaaagtgctgggataacaggcatgagcctctgcgcccagcccagccctcccgtcctgagaggtaaggctgcacttgaagagtgcagcctagacccgtgcctgagggcacaggaggtgcaggctctgcccaggtggagtctgggttatctaagttgtggtcaccaagtgaagtgatccccggctgtcccccgcagctgagatctttgccgccatctcaacaaaggttcctatacttgtctttcccctagtgtgaacgagctctatgtcgatgacccagacaaggacagcggtggcaagatcgacgtcagtctgaacatcagtttacccaatctgcactgcgagtgtgagtactccacgcagcccctccctccagcaggacacctccttagggcaaatgtgtgtgtgcagaaatggcaagatctccaggacaagccaagccaacatatggttctccccactcttttttggaggagaatataattgcgtatgcatgcacttggaggttttctggcataataaacacaagacactactcataggggttaaccctggagagcagctgatttggtgcagggaggtgggatgtctcttagggtcatgttacagcttcgcagcagagcctgagagtctcatgcaagtgacttgttgaggggaggaagctgtaagggagaaacgcaggatagggcagtacgacaggataagcaaagatgtgtgttcagctgaagtccaaactcagcctgatctcacaggatgctgtggggtgtgaatgacaccatagcatttgtcacacccaatagcaatgggaccaggctgttattatccatgtcattgggtaatggctgcagagtggtgtgcgtggcaggggtcatatcacctcccaagcatctcaagcaagaagacctccgttcagccaagagtattcatctggagaagggcgcagctctgagtcattggcagctgacacctagagaagctggagcggtccaccatccatgagagagtgcaggacagggctcaagagcatctgcaacagtgaagggctgggagattccctttttgacttcacacctattttgttttaaccaaaagaatgaattacttcttttttttttttttttttttttgagacggagtttcactcctgtcacccaggccggagtgcaatggcacgatcttggctcactgcaacctctgcctcctgggttcaagcgattcttctgcctcagcctcccgagtagctgggattacaggtgcgcaccaccatgccaagctaatttttgtatttttagtagagacggggtttcaccatgttggccaggctggtctcgaacccctgacctcaggtgatccacccacctcagcctcccaaagtgctgagattacaggcatgagccaccgtgcctggcccagaatgaattacttctacaaaacaaaactcatttgaagtctgatttggagtcagatcctggctcctttgctggctaaaactgtgaccttggctagggtgacctctccgagcctcagattcctcatctgcaaaatgggcttagtaatgtctgttgtctgaggttcttgggagaatctaatgccatggtccctagacttgtcagcgagtggactgggcgccctctcctggactggggttccagccgtccctctgcccagcctggcacagagcctgctgcaggcccttctctccccaccccctcttcctgttaaaggacacagctgagagaacactgggtgcatctccggccagagataggaagagtctcagccctgtcattgcttttggtgagatttacgtcacaattttgaatcctcgctgggccccaagccagggaacctgttgaaataggtcggtcttattttttgttattttttttctttcacttagaaaaataattcatctggcagattctcattcaggagtgactgtatctctggaacaaggaaattcttagtcagaccagaggactgggacaagtgtggtaggaaagggaagagatgtggttccaggaggggccaggcaacctccaccccattccctgccatgccctgctggatctgtggggctataacctgaacccccaaccccctcacccctgttagagcccagcattctggcttttctttaaaagaacttcacatttttattataggaaaaaacgcatgctcatcattgtacttctggagaacacagggaagcaaaagagatcacccataactctgccacccgacagcagtgttggtgacattttgacatcattctgtccagctggccttcctttctgtgtttctgaacatagctgagatcgtactgcatgtatgatctcatatcctgcttttaaaaataatattcttcattatacaactaatagactatatttcaatcttaagacatacattcaaaaatacaaaaataatatgttttttaaaaagcaaaagtacccctcccctgtcccccttcttgtcccagcatgccatcttccccaaaggacacctctgctagcaggtggggcccccgttccctacccctacatgtgtgtgcgtgtctgtgaacatatattgggtttggggttgtttttgttgttattgttgttttttctttttacataattaattgggaccctaccatatgggaaccttctggagtttctttttttttttttttctagctagtgtcttggagctgttctcatattactcataatatgagtaaaataataacagctgccatttattccattcttccaggccaggccctgtcctgcgtcctttggctatattaaatccactgggatttgaggtatcttagcagaatggctgaagggtgggggctcagaagcaaatccacctggatttcattccaggctctgctgtttcctagtggtgaggtctctgtgcctcagttgccctagatgtagaatgggactgataatattatcttccccacaggggtgtttaaatggtgttttgttttgttttgagacagagtctcacactgtcacccaggctggagtgcgatggcgcgatcttagctcactgcaacctccgcctcccgggttcaagccattctcctgcctcagcctcctgagtagctgggattacaggtgcccgccaccgtgcccggctaattttttgtattcttagtagagatggggtttcactactttggccaggttggtctcaaactcctgaccttgtgatccacccgcctcagcctcccaaagttctgggattacaggcgtgagccaccgcgcccagccaagaaggtgtgttcttatataaaaggcacttagaagagagtctagcacgtagtaagtgctattttacttttcttttctttctttctttctttttttttttgagatagagtttttctctgttgcccaggctggagtacagtggcatgatctcagctcactgcaacctccacctcccaggttcaagcgattgtcctgcctcagcctcccgagtagctgggattacaggcacctgccaccatgcccagctaatgttttgtggttttagtagagatggggttcgccatattggccaggctggtctcgaactgctggcctcaagttatccgcccaccttggcctcccaaagtgctgcgattaccggcgtgagccactgtgcccagtcctgttttacttttctttaaccctcacaacaagcctgtgatagaagaggaaactgaggcacagagattaggtaacctgctcgaggtctcagcgctagtaactcagccactgatctgctctgagcctcctccacgcacctgcatttagcccattctttgtacctgccgcacggcactgggaagagggctgttccactggctccagtgacaagcagttgaattgcttccagttgccactatttcagataaggttgcctgagcagctttgcacacacatctggacacacattgtggatctagaggacaggctgccaacattggaactgctgagtgaaaagcggacctgcttgtgttttctctaaacttcacattataccattggcatttcccatgtcctgtggacccgtgagggtcatttcgaatggctccagcacgttcccttctatggctggatcctcacttacttctctgtcctcatcgaggaacacagagttgttcccaattttcccttttaaggttgtccctctttaaaattgcttccagctgttcttcctctgtatggcacctcctttctagcgctcctgccagggaaattcctacatttccatagttcacagggatcatctcaccactggctacttggaccatctctggggatgcagttggcattggcctgcccattttacagatggggaagccatctgagtcccagtgaggtgacagagggcagggcctatcttttccctttgtgcattcctggtgcttatcatagggctggtagcataggcgatgggtaaaggaaggtgtgaatgaatgaataagtgaatgatggatgaatggatggggggcctgagcctattcaccccataaacccaaaaactctctgaaggccaggaacggtggcctacacttgtaatcccagcactttgggaggctgaggcaggtggatcacctgaggtcagaagttcaagaccagcctggccaacatggtgaaaccccgtctctactaaaaatacaaaaaaaatttttttgtataggcgggcacctataatcccagctacttgggaggctgaggcaggagaattgcttgaatgcaggaggcggaggttgcagtgagtcgagagcatgccattgcacaccagcctgggcaagagagcaagactctgtctcaaaaaaaaaaaaaaaaaaaaaaaaataattacaaagactatctgagatacaagagctaacatttattaagcactttccacctagcgttcatcagaccctaagcattttctacatctatgaactatttgatccccataatctttcaaggagggttcaattatggtcagccccccatcttacagagaaagaaactgaggcatccagaggttaagtacctgaggcaggacccagattcagaggaccagtatggcagaccccagggtggccccgggacccctactatgcactgcccccctcgcctcacgtttagcggagtcattgtcctgtcccctgtagtctttggaccccagaccatgagctcctggaggtccccagcccggcctgcccctgcaatggatgaatgaaggctcccagagagaacaggctggcccccatcctcccgcgtctctgggtttgtgactgttgtctccctttggctcctgcagtggttgggcttgacattcaggatgagatgggcaggcacgaagtgggccacatcgacaactccatgaagatcccgctgaacaatggggcaggctgccgcttcgaggggcagttcagcatcaacaaggtatggaagccctgcctcagccctttctacctgctcccctttcctgctgtctccccgctccctggaaactggttgtggaggcactcactcgacctgaccctgacacagcccccagcaagcgagggttcgtgtccagctgcctggccgttcctgctgagaatctggatgggggtccaggctccctggggttttaagcccctgatggctggttcaggaaggagctactcttctctccagtgagggggacaatgatgagaagacctgaggatttgcagcccccagccctgggttcaagtcccagctctaccccttcttggcccctacaagtcacttgacccatcttaggctgagggtgtgatggcgataatagtatcacgataccacccacttcacaaagtttgtgtggggattaaatgagctaatgcagattcattcattcagaaaaatttttgaatggcacgttctgtgttccagggtcggtgataggctctggggcagcgttcctgggctggtggggctcccattctggtagagggagacagtctacaaaccagaaagcatcagggatgctaagtgcagtgatgaggaataaagccaaggggagtgagatgaggtgggcttgaaagtaccttgtccgctcagaaggaccattcaaggttcactgttgttttgtcctcagaaccaggagcttcagatcctaagtcaagtgggtgaacgcagtgcccttgggagggccgaggcacccggtggcagctggcagggttttgctcagcacgtgccggccttcctcgaagctcggtactgtcacagtggagcctctcaacaacgctgtgaggcagcaccatttgacaggttaggatgctggggcccagagaggttaagtgtcttgcccgaggtcacacagctatctgcatgtcccacaactccccttcccagccccagccaaactgagccactggccactcctggcttctccttgtccctcctgcagcctctgctcagaacgcccttcctccagaccctgacacctgagctggggttgcaaagtcactggccacatccagcccaaagataaattttgtttgtccagtatagcatttaactgcatcagaaccagtatgaaaagaccaggaatccagatttctggcttttaaaagtcagaggctctcactacactgggtccgtgttcccgctatgacaatgacctggcaccaatgggcagtgttcccctttagagagggtgtgtgctgtcccttcccacagtccctggcaggcggctggaaggccaggcctggtcatctgtcaagcagggtggacttcttacgtgacagttcagggctcccttaagtgctaaagcagaagctgcaaggctttcttaaggtttcgagtgttgctgggagaaatctgctgcatgttgtgggttaaagggagtctctcaccagcccaggccctcaggaggaggagataccaggaggcagggatgctgggggtcgtggttcactgggggctctctctgcccatgagctgccacacagcacctttgccatgccccgtaatttggattttatggtggttgtgatggaaagccatttgagggttttgaacagggaggcaatgtaatcagatttatgccttagaactggactatccaataggttgccaccagccacataaggctatttaaattaattcaaattaaatgtacaattcagtcactcattctcatcaaccacatttcaagtgctcaaagccacgtgctggctaggggccacagcgttagacagtgcagagagaaagcacttccatcgctgaggaaagttctgctggaccgcacacccttagaaggatggctctggtggccgggcgcggtggctcaaacctgtaatcccagcactttgggaggccgaggtgggtggatcacgaggtcaggagatcgagaccatcccggctaacatggtgaaaccctgcctctactaaaaatacaaaaaaaaacaaaattagccgggcgtggttgcgggcacctgtagtcccagctactcaggaggctgaggcgggagaatggcatgaacccgggaggtggagcttgcagtgagccaagatcgtaccactgcactccagtctgggcgacagagtgagactccatctcaaaacaaacaaaaaaaggatggggctgggctggagagggtggcaggcagtggttgtggcagtggagctggggagatgtggtcggattagggaggtagaatcaataagactcagtgaagaatcggatgtgggggtaagggcacatgtggaagcaaagaaacctttgacgtctttgtcttgacaaccgggtggtcctgtttctagacatggaagcttagaaaagcctggagtctgtgggaagtaggtagggctgggcactggtcattccactctggtttcctttggggttcccattaggtgtctacagggagaggtgaaattggaagttggaggtgtggagagttcaggagagggttctggaccacagatgttgaggtgggagtcattagtgaatagatgatgttggaagtcatgggtcctcagagtgggggctccttaagcctccaggccagcagcatcagcatcacctgggagattgttaggaatgcagattctcaggcccccctaagacccaccgactctgtgctagaacaagcgcccctcagagattctgatgccactgaagtttgaggagcattggtttaagcaagattacctacggagaggctgtagatccgtgttctaaacctggggtccacagacacccccaagaagagcggattgaatgcaagagatctatgaagttggatgggggaaaaattgacatctttatttttgctaaactcgatctaaagtttagcatttccatctgcgatgaatgtaggccacaaaccacagtagtattagcagtgcctgggacctcctcaacaacagaaattgccggtatttatagcacgttacagttgttgcagataatttccagagactgtttatatgcaccactgttttaaaattacggtgattggccaggtgcagtggctcacacctgtaatcccagcactttgggaggccaaagtgggtggatcacttgaggagttcaagaccagcctggtcaacatgtcaaaaccctgtacctacaaaaaaatacaaaagttaaccaagcctatgcttgtagtcacagctactcgggaggccgaggtgggagggtcttctgagcccagggaggtagaggcttcagtgagctgagatcgcaccaccacactccagcctgggtgacagagtgaaacccttaatcaatcagtcaataaaaattacagtaattattagacccaccactaggtcatcttatttgatgcatcagtaaagcagcatattcaaatgtggatttttaaatattttaattactatttaaatatctctttactttgtaatcctatgcattttacgcattaaaacattttaagcatttaaaacgtaggtatcattagactggcaaaggatcatccgtggcaccaaaagccttaagaacctaaggtctggagagaattgcagtttgaggactgagttctggcgccccgcccagtcacttcgaggtggggagatgcgggggtaacaaaaggtgcaagaaggggcagtcgaacaggaaggaggaagcaaaggctgggcggagcctgcagcctggaaaagaacatatgtatagatatcaaagagcagggctggcgctaccaggctcaggaaggcaggcttggaatggacagtgatctaagtgctgcagagagtgctccagaaaacgctgatgatgaggagagaaggggccgctgcaggagccacgtccttacgaagcaatgggagccagacgcaggccacagttgggggtttaaggccttggagaggttcacagtgccggcaggcaggtggggggttggtgggggacctctgctgggcctccataccctccctctgtccccacctcatcctcttggggaaccactactcacccacaggcctcagctgatgtgggtccctcaggggaagtcctccctccccttccctgcccacccacattcactccccaccacgcccctcatcacgctgcggctgctgcctgtgcctcctccttgacttggcctctccctttgaccactccactcaggctttcgtgctattgagcatccacctcacgcctggctctgtgcttggcgctgggctgcaatgggagagaaacagccatgctccccgccgttggtggcccatgttctataacggggggacagccagtgctcaggtaaacaggaaatatgtgattttgataaagcagccgtgaagagaatgacggggtgctgtggtggagaatgaaggaggagacccctgaggttacaaaggaagccctgtctgaagactgaagatgaagatgcacagatgaacagacgtacacgcacacctcctcactgtgggccccccgcccccggggagatgcaaccacctgggctgaaaaaatatatgtaccccagatggtgaccaagaagggatcgtgcttattcaagcacctggagtgacaacccacgagacagccctgccaccaagccctcccacctcttggcaaacacgcccaagactgcagtctgctccccttagaatgggctgtgctggagcccccagccagctctgggtgaacttgtcctttggggtcagacagacctgtggtcaaggatcccggctaccgtggtcactggttgaatgactctgggcagtttagcttctctgagcctcaggttcctcatctgtagaatggggataataatacctcacaggctgtgaaacatgaacaaactctgcagtagagactggacaagcatcctggcctgcctcatctcccgtcagtgcaaagtttccatgacctcatcagctggcacccaccttacaagtgcgcctgtggaaggcacatggagggcgtccaagaaatgggccttctctggtcaggggagtgccagggagtctttgaaaggctcacaccagcctttcttagacccgcgttatggctgccacgtactaggttcttacccagccctttccacatattagctcctttagtcctcacagtagcctggaggaaactgaggcacaggaggttaagtgacctggtcaaggtcacgcagccaggattttaacacaggcagcctagcaccagggccctggccctctgagctcactgcctgtggctgcttctcccaacatcttggttacacatgtcatgaccagctgtgtctgtgtgccccaggtcacagcctagggcaccctctgccccatactcctggagggagtagagaccgtcccccaccccagcccagccactttccctttgaggaaccgcccatcaagaggtgctcaaagaagccaccagggtccatgtgctgtgatggcaaggtcagcagccagcccccgcacctctctcccagcatcaggctgagacttgtcccatggcctccttatccgacccccaggaagttgaccagcagccagatgtcagagtttgcgtgttttgagcagcagcggcagcctcaccagagaccccacggtgacctcgtttcatcagccagccccgcaggaggaggacaggatggggtgaggggtatggggcctggctccagctatatgtttttaaaatccatcagagacactgacgtaggttcctaagtcacaggctctaaaagcgttgctgtttctttcttcagcccagcatgtgctggcatgagtcagccacctgtgatggatttggtgtggagggggagtgggttcctgagtcacagcctcgcgcggcccggcaggggtggcaggtgctgaggggacagccttcttgactcacttcactcccggagcacgcggcccaggccccaatcccagttctgaactctgccatggcccgatctgcggaaggccctgtgtcactgcgtagaaaacctctgggaggacacacgccttatggctgtgggtttcttactcccaggggtggtcagcaacagggtctttagtctgactgtgtctcatgactgttttatcatgaaaatgtacccaggcattatttttatcggtgaaaatgaggcataaatgttaaaacccacagtgggcttttcctcacgccctgcctgtgagtgttccctcttccgggagggcccttcttggttggctccgatgacaaacatgttcaccctacaaacccgatctgaggccagctgcgggctgctttgtatgcatcacctcaatgaatcctcccagtaatcttctggctttacgcccatttcgctgatggagaaactgaggcatggagtggttactgacctcgcctaaggctccccagctaggaagtggggctgggcttggggccaagtgtagaactcagagcaaccgctctactatgggttattgggtccctgaagcaggcgatgctgtccctcgagggagatcttgccacgcctttgtttctgctccactcctgacccagcaagtgtcccttctccactgtagcctgcagctcgctccactgcgagtttgctgaggccgaggctacaggctgtcagcttgatgcctcccctgtcagccacaggctcgggccctgctgaagtaggaatattcctgcaggaagtccccaactttgtgtttgaaacagacatgcttacaaaatcagactttgatgggctgctgcacgataagctatattccctcctcggacacagctcgcacagtcttcttcattgggctggaataaggtaacccccgagtttttcagtgtggcatctggggacctttgataaacagccccaactcctcccttgtgcctctttgtttcctgctgctgccagcaccgccacctccgtctcatttggagttcaataataccagactcttagttccttagacagcccacatgctgggcagtttctgtcctctgcacctgttcatgctgttccctctgcccagatgcctttcgctctcttcctgagtaatgcagactcatcttcagagccttaacacaggatgtccttccccctgggaagccctccctgaatacagcctgcaccctcaattgagccgggggccttccctgtaacccccatggtctgcaaattcctctgggccagggtggatcccacagagtctcattgtctgttccaagtctgtgtcacaggggcttggccaaggccagattcttgtctgctcatctccccagttccggcatctcctgaaggactggcgccatgtggccatcagcccaggctgcggaggtagatggcatccaggcatcagaggagggagcagtgcgtccaacagacgtgagctgagactgcagctctcgacatgtgaccttagcaagtttcttcactgctctgagcctccattttcttttctgtaaaatgggaattatcagatgacaaagtcaaaggattcagtgttgtttgtttagtcattcattcattcaaaaagtgtctattgagcacctgctatgtgtcggagtctggggagcacagcagggcgtggacatgctaatgggaggaggcagacgagaacaggatgggtatgagatggcaggtgatcccagaggctgtagcaggtaaggggatggggaatgggggccagggtgctcttttgcacaggtggacgtggagggcctctctgttgggccctgagggtccgagggagggccatgtggaagagggtcccaggaaggggtgcaggcacaaaggcctaaaatggggccacactggatgctgttcccggcacggcaggagaccagacaggaagcagcagaggacacagcagcaggaggccaagcggtggggacacgatgcttggccagcggccagatgtggcctgtgggccaccacgaggacatggacctggactctgagagaatagaagccgtggagggttctgggcagaggagtgatgagatctgatgtagggtttaaaaagatcttaacagtcattattgggaaaaggcccaggctgtggggaacatggaagctgggagcccagggaggagcctgccattgttgtccatgaagagacgaccttggaccagggcagcagagaagaggtcaggcgccaggtgtgtttggaaggtggagctaacagggtttcagctgatggatgggacgtcgggagtgagaaaggggggttccaggatcataccaagggttctagtctgagcctctaggaggaggaggaggaggagggttccaggatcataccaagggttctagtctgagcatctgggaggaggaggaggaggagggttccaggatcataccaagggttctagtctgagcatctgggaggagggaggagggttccaggatcataccaagggttctagtctgagcatctgggaggaggaggagggttccaggatcatactaagggttctagtctaagcatctgggaggaggagggggaggagggggaggaggagggacttcgtgctgaaacaaggagaagctgcagtggctcctgccacatggttgtcaccagcatcctttgttctgtaaatactcatccagcacctcttgctggcttggctctgcgagggcttgagacccagggaagagatgaggctaccacagtctgtccatcagggatcccccgtctagggcactggggcaaacttgggtaggaaatgataggggtttggagtctgaggaatccccattagtctgcaggctcaaaggtcatcccccagctgactgtggggtcagccgcccagaatccacagagctggagggggagcagctgccatgagtcctggctttgtgcccgtcgcccagatgggcacttcacatgcaccctctcaccagatagtcctggcagccccctcggaagctatggtagtgcccccattctgcagatgaggagcctgaggcccagagagatggggtgactcctttgcacagttgaaaatgatacaagcaggatccaaacccagatctgcctgattccagtgtcctccctggatcacacagggtgaggccccaatgttccgccccctggagaagtcaaccaaactcctgaaactcacatttctcccccaggtccccggcaacttccacgtgtccacacacagtgccacagcccagccacagaacccagacatgacgcatgtcatccacaagctctcctttggggacacgctacaggtgagcaggggacactcgagatggcatggccgggggtgggccttcaggggctctgtcacccagtgccctctgccctctctgggcactaggaagagttaccgttaaggtgacatctaagccaagcctggaagggtaagaagggtttcaccaggaacagaacagggaaatgggtcctaggcagggggcgtctcaaacatcacccctctcctagagcgcccagctggtggttttcatgtgaaagaccctcaaggttactttcagaaaaatggatcagtaagcgtatgtgacacggcatgttctgtgccgagatggtccagggcacaagggctcgcttggcagctgagagggcccagagcacttgcctgaaatgggagccggcaggtggggtgtgtggggtgcgagagacccgtggtagactgaggaaggtggagactgaaggtctggttggtgactcagagcacccatctgcaatgaggaagatggacccaggaggcaagactataggcagggaggtgagggaagggcccagaccgaggcaggtggaggggagaggagcagcggtctcgcattgccacgtgcaggggcaaaacagaaggacacagaaactacagtcccaagtttagtcattagtggggtggaaatctgatttttttaaaaaaatgtacagaacttagcttagggcccatccatccattcattttctgtccatccatctagtcaacaaatatttacaaagtacctaccgtgtccaggccttgcataccttggtgaggacaaacatggtccctgcccacctggagcttccagtctaggggggaagacagatgttgatcaaataatggtacaggccaggtgcggtggctcactcctgtaatcccagcactttgggaggctgaagcgggcgaactgcttgaggtcagaagtttgagaccagccttgccaacatggtgaaactctgtctctactaaaaatacaaaaattagccgggcgtggtggcaggcacctgtgatcccagctactcaggaggctgaggcaggagaatcacttgaacctgggaggtggagattgcagtgagctggtatcatgccactgcactccagcctgggagaaagagtaagactcctcccaaaaaaagaaaaaataaaaataaaaataaatggtacaaataaatgtgagataaagccatgtcacatgacaatggaagagaacattctagccttcttgtctctgtaaccaccgttctcatgggttagaaacgaagccttcacacggtcagtctcaagacagcaaatagacaaacttccttttccttgttgagaaattgcagttccttccagttgttgaggaattgcttgttgagaacatgcaggtgtgttaagtgctcagtaaacatcagccgcctgagaccaggatcagggattatgccaccccgctgctgcccactgctcctggagtggccacagaatcatgtccccacctacctctccgatgtctcctccttccttctattcaaacacctcactctccttcctcctgggggccacgtgggcctgtctccatacttaagcctttgtacatgctgcttgccagtttaacttcccactttcctccagatcttggtgtcaatgtcatttcctccaggaaggcctccagggtgtctagctcgataacccctgttaaccatgcccatggtagcatgctccatttaccaggtatgccttgtccttctttagatgttccttgaggccaacctggtttcccattgtcctcagagaaaaggtgagatgtggttttcagccccactctacagcagcccaccccactgcccggaggagggttttcttcacatctgctatacgttctctgcagcagacatgatggggggcccacagctctggggcatccctgcctggactcctctatgggcctttcagaggaccctgggatctcaggagaaactttctgggacccagaatccatgttcacttgaattttctgtgtgacttcatggaaagagtccagcttagtgtcagacagacctgatttcagagtttagcttagccacttaccagccgggcaagttttggtgtctttccaagccttgatttgctcttctgtaaaatgggcccaataatacatcattaggggcatgaaatgaaattatatgaaggggccaggatggagcagcacatagtaggggctagagatgggaaacaagcttgtgcctactatgtgccaggcccctgctgcctcttgctccccacaaatccgctggagcccccttttacacattggtagggttcctagaccaggtggtacctggccatcccccacaaccagggccaggcctggaggtggaggtgtcctggggaccatcccctcactgcatttttccacaggtccagaacatccacggagctttcaatgctctcgggggagcagacagactcacctccaaccgtatgtatccctgctgggaacagccttctgctccaagatgcccagtacagcaggcagggagggggagggcagagaggtgggggtgcctgtccagcacccactccaaggcagggaggctgctgctcacactccattcccacagctaaccagtgggaaggtggacccagccccgtccagacccagaccctgatggagaaggaagaaggcttgtcccggggcacagcagacgcacgcacgcagtggataccagctattaccattattgttgctctcatcacagccacatcatcatccttagtggaactaattacctaagatcccacaggggagctatggcagaaccaggatctgttctgcctccaggtcgcaccgtgagaacaggtctgtgggtggcccagtcagctgtgaccacatggctgcctcccccacacctcactctcctcctgctcagactcctcccatcgacagtggctcctcctagagtcctcgccctccttagctccctggcaccttggcccagatcaaagagaaccgcacatctccacacgcagacaggagagcacgcatacctttcgtgcacaccaacacacatgagctcacatggccccagacacgtgcacagaatgggcccgggaggcctgtgtgctcaagcagacccgcagacccactgctgcacagggtacctggatttttcttatttcctcacctgagctcaccttttaacccacatcttttcttattatttcctgaaatgcgtttgctctcccattgtcagggatccaaggcaaagaaaacatccctctgtgacctgcccccccgacaaatcgaacctcatttttctgtgtccctgtgagtccttgtccataagcagaactcacttttctttttttccaaggcatggattgcagtttaccgtctgctttttgtacttgaccttattacatagccacgattttcttactttccagttgtaatgggagcacagttgtccatcttgcagctctgctgtgcttttttttttttttttttgagacggagtcttactgtgtcacccaggctggagtgcagtggcacagtctcggctcactgcaacctcagcctcccgggttcaagcaattctcctgtctcagtctcccgagcagctgggattacaggtgcctgccacaatgcccagctaattttctgtatttttagttgagacagggtttcaccacgttggccaggctggtcttgaactcctgacctcaggtgatctgtccccactctgctctgcttttctaagtcattgtcttctcaccgaaagtgtctgtcgtttcctgtgtttcactgtggcaataatgcctctgatatgtacagggttggcgctctgttacccgattgctttccagctgtgtctggttcccattcatgctgcctccagcaacggataagtatacggcagcacctccttatttgagtgcaaatgtccggttgtaatagaggtagatgattcttggtgtggtgccgtggtcattgtcgttttgtgtcatggtaacatgtcatccgacgtcggccgtccacaaatgtctgcagctacgatggaccctcagctgctggacaggaaagaggatcaagctaagaaggcccagagtgtgcaagcagagagagggtgtggacagaaaaccttgccttctccagggctagtggcgaaagctatctcaggctggctcaagtggagagaaaaaagcatgagatcaagcaatggacagctggggaagggctggcttttatttcctcagctcccaagctcagtccctggcactgggccgttgcctttgtaggtccctctgtgcccaggtcttgctatgggggttgtttcttggcattaaggtctcagttcaaacgccaccgtctccaagaagccctcactggtcaccctatctaaagtaaccctcactcctaaggacaaacctgttttttcttcctagcatagaccactctctgaaatcaccttgttctcccagtcatctgctgcccttggctgttgcgccagctataacatggcactctgccttgcccactgctttgtccccaggacccagccctgtacccagggtatggtaggtataagaggcctggaggccactatggaagagctcctgccagatggtggtggagtgcggtcatgaggacctcggcctccagtgtccccctccactctttcccagccctgtggtcttgggaaagtcatttaactctgctaagcctcagtttctgcatctgtaaagtgggaagaatcctctccaccttaagccttgctatgaggattaatgagatgcgtgtacagagtttagtacacggcctgccacattgtgagtgctcaataaatgttggccgttctcttcattatcgtcagcagctaacttcaggaacgagatcccctagggcagaatctaaggagaaactttcctatatcaaattgtatcttgtattgtggtactgaattgtttaactggtcctgaatgatataactggaatgaaaccagcttgtcatgtatatgtatacacataatatgggctgtcatatatatatgtgtgtgtgtgtgtgtgtgtgtgtatataagtatacacacacatacatatatatgggctgctggttttaagaatgcagattctgggccccactccagtggcgggatagggatgaaacaagattggccatacgctggtaattgctgaagttgggaaatgggtacgtgggagtccattatacaattccctatgttttaggtttgaatttttctgtaagaagattttgcgggtaggggaggaggagtgagcttgaagggaatgtgggctggcctagaccaggttggagccagcagtctctaggaatggtcagctcacaaggaatccacatgggtgtaattaactgcagtgtctccagtgggcatttggcaaattgtatcaaaggccttaaaaatggtcattgcctttgagtcatcaattgtactcataggagagtaagctaaggaaataattaagagagtgtacaaaaatctaggaaaataatgttcattaggtcattgtttataaaattgaaaatgaggaaccacgtcagtgtccagccatagggggttgactgagcatggtaactgcccaagatgagcgaggtgtgtcaggaccttactggcagtcaggcagcaaagatttattgagcacctactatatgctgggcattgggctaggttctggggatagagagatgaataaaacaaactctgcagagcttatgttctgtgtcttagacctgaaaagttgatcatgatgttcagttcttagaaaaagatggctgggcgcggtggctaacgcctgtaatcccagcactttgggaggccaagtcgggtggatcacgaggtcaggagttcaagaccagcctggccaagatggtgaaacccccatctctactaaaaatacaaaaaattagccaggcgtggtggcaggcgcctgtagtcccagctactcaggaggctgaggaaggagaatcacttgaacccagagggtggaggttgcagtgagccgagatcgtgccactgcactccagcctgggtgacagagtgaaactccgtttcaaaaaaaaaaaaaaagatacggtatggtcctattttaggaaaatacaaatatatgtataaacatgtctggcagtttatatgtgagactgtgaaccatagttttctgaggatggtgaatttatggtgattttttgttttgtccttggtgatcacctgtgttttgtacaatttttttttttttgagatggagnnnnnnnnnnnnnnnnnnnnnnnnnnnnnnnnnnnnnnccacctcccgggttcaagcgattctcctgcctcagcctccctagtagccgggactacaggtgtgtgccaccaggcttggctaatttttgtatttttagtagagatggggtttcaccatgttggccaggttggtcttgaactcctcacctcaagtgatcctcccacctcggcctccctaagtgctgggattacaggcgtgagccaccacatccggccttgtacaaattttaacaagaaatattacaggggtgattttgataaggcattcactttttcattccttcaagtttttaacctagggcaatgggcgtttggacaccactatcaagcgtggtcttgggctcttgttttaaaaatgcaaattctgagctccacccttgacccatttggcgggatgctcctggaaagaggtccaggtgtctttttattccaaatgattcgactgcttctgacatctgagaaccattacagggttgaacagagggatgttggagtcttcatggactgggctctgcggctgcaggacttttctcgggttttcagaggaacctactcaaaacaattcaagaagcacttcctttgcttactgagatatggctttggcaggaaggggcagggagggagtgtcagggcagtgaatgctgtctgcattcccagccttcttacagaagaggactgactcgactctgcgaccaggcttagaacccacaggcctaaatttctgtgttattttagctctgtagtccgtgacccgagattgtggaaggcccatgagcttcctgtaagcatcccagaaggcccaggagagttcatacctttcctgagtgatatttggcagctctgggccagcattctatcagcccagcattggactccagttacctcacgcttatcagcagctgattcatctgtgctttcattcatgcccctgtccagtcatccttccatccgttcattcattcagtaagcatttgccacggtccacttggtaccaggccctgcacggggctctggggacacagagttgagtaaggctccatccctgccttcagcagctcccccatccaggaagaactgatctgccgttgatttctttccccattctcagttcatcagtgcttcattggtgcagtttttctggttgataggctcttttctttttaatactgaaacctagtttgttttaaaagtaaaactattcagacaatgtcagaggatgtacaatgaaatgggatctttctcaaatcctgccttcctccccagaagctaaagctgcccgtggttccttgggcatctttccagataattctcctatatatttacatggatacagagtgtctcctcctcccccaatccatggacacatgtgtatcctgtcccatgacttggttcttttccctgttggagaatagctgctcctagcacccacacttttttttttttttttttttttgagacagagtcttgctctatcgcccaggctggagtgcagtggcatgaccttagctcactgcaacctccgcctcccaggttcaagcgattctcctgcctcagcctcctgagtagctgggattacaggcacctgccaccacgcctggctaatttttgaatttttagtagagacggggtttcaccatcttgggcaggctggtctcgaactcctgactgcagatgatccacccgcctcggcctcccaaagtgctgggattacaggcgtgagccaccacgcctggccaacactcactctttcatggttgctctattgatggacatttgggttgtttccagaattttaatgatgtgcacagtgcaggaggaaagatcctgatggatagagtctcccaattcccggtatccaaggggagaagatgaagagcagttggttggtggtaaaactggggaatgagccccctgccgtgcccagggaatttaggcttaggattgaaatgacatagagctgtcagcgggcagtgcccgtccccctgcttcattctgctgtgtccttcccgcagccctggcctcccacgactacatcctgaagattgtgcccacggtttatgaggacaagagtggcaagcagcggtactcctaccagtacacggtggccaacaaggtgcgcgggcggtggctgggccgagctgtgtgcggcggcgccctctgctgacggagagcagagatgacaggcggctgcaccgacgcactttcttctgattcctttctggaggcctttcctgggggttagcttgggccaggcgctgtccctgggtaaaattgaaaagcccagtccctgccatgtggcagtctcagagtcaaggagaacagatctaaccaggagatagggtgtgatgcgtttgacaaagagcaggtagtctctgtcctacaaaggtcctggggttgcaggtctcaaacagccctgcatctggtccgagtccttcagacacagacccctgggtgctcaacacagacagacactcctgctctcagggcacaggcactttacccaaactcatgaggctactgagtcacaccaagatggctgttgattaatttgctgttgattgacaggggtgtccccaggaccccaacactcaaagtcatggagaagacgccaggccttagtgggcagcagagcatggtcagagtctgcagagtgggatgacccagcaattagtggtctcaagacaagacagccttgggcttccctgggggtatcccaccaatgggacatgaatacttgaaacctgttggttgaaatgcccctgctagaccctggcggatgggtttttcccacttaccaccaggactgtcctttttcttctgttccaaggctgcccaaaccccttataagtgatacctgtttagctcagttaattataacaacagtaggaggcatagctgtcactcattgagtacttcctgggggctagacatgctaagctctcttcttccgtcttctcaatcatcatgacagctctgatgttgagactgttattgagcccattttgttgatttgaccattgaggcactgagaggtggttgtagagctataaagtggctgagtggggattagaacaggttttccttgggctccagagcctggcttcttgatcacctcacgcctcggtctgaggaaggggctgtgagtctgcccacctgcgagctgctctctgtccaatgacttagtccctctgttctgactcaccctaaattgatgttcccgggagccctgtttcttttattcactgtttcacagggggcatctcattgtaaccctcacatgctcatagcagctaacagatggaaaagcacagatgcaagctcaggaccacgctgcagttcaaattccagctcagtcattcactagctattgaccccggacatgtcacatagccactgtgtgcctcagtttactcattcataaaatggagatgatactttataagagtgctgtcacatgaggcaatgttttcaaaaatgcctagcccaccaaaaaaaaaaagcctttaggtaagtgatactgactgctgctatttttcactctttttctctgtccctcagctctgggttgtgacccagacagtcatcctgccccagcagctctcctggagaaagctggtcttcccttgcacaaagctccttttcccaatgctttggcaaggcccagcagccaaatacagcttgcttagcttctctatggctgcagccgcactctgccctgggagcaggcagcagcgacccagcgggaggtcagggctcagtgttacttacccccggagtggcctgggctcctcaggctcagcatgtggggttgggggtaccccagtggttcaatttggcctccagttgttgcagactttagcaccttgaagtgcccaaactggagagatcccagggatcatcatcccaggcccatccgtgtttagatggggaagccaagtccctgagggagggaggggctggcccaaggatgcactgttagctcagcctcgtagtatccttagtccctgctgtgtgcattctcaggaaggttggtggcagggcggggccttctggctttgcagttcagtctattcctctgaagaagctagcccactccccacgtggcatttacacccatcacacacacacacacactgggactcctgcttattcatcatgtgtggctcagaatgtcccctccccagtctcccagatgccgcccgggagaatgggtcattcattcattcccctcaactctccatgttcctccatcccacatgcatgatgtcacagtgttagggatattcttatgtcttcctccttctgcagactgcgactccctctgggtaaagggcaggacttgctcacctcggggtccccagcagccagccatgggccaccacagtggaggcgttcagcaaaccattgttgaataaatgaatggatttcgcgtggcccagaggttgaaggaggcaatagccaaaaattgcacttttccttttacagctctgctttctaatttattttctgattctggtgctgcttgcagctcacttggtcaatttctaaacaaccaagggtatcaaaaatgcccagctgtgcacggcagagttcagggcctccaggggaagggatgtgagagagggagtgggggagtctggcttcgtggggcagagagggaggaaagccctttctggagggttgctggggggccctctgcaatccagtccccgccccccctgagacacagtttgtacttctgattcttatatcctctaccccaggaatacgtcgcctacagccacacgggccgcatcatccctgcaatctggttccgctacgacctcagccccatcacggtcaagtacacagagagacggcagccgctgtacagattcatcaccacggtgagtggcctggggcagtgggtggggccctgagccagccaccctgcgcctgctctgggcccctttccttggcacccctcacctgttctcgctgaaacaggaggcagcctgcagggctaggggctctggctgggcacaggaggcttcgaccccaaggatgctgagaaatgttgtcagaaacacatcagtatcgatgacgttttgtctagaaagtattttccagaggggaatgccctgaaatccatttaattcctgaagcaaatctccatatggttccactagatgtttaggattttctccagctttttattgttatggaaattattcttagcagagtttatcctttaatgtgtaaattttgcaccaaagattgaactcatttttttttccaggtctaatttccagttatagctgctgatagggtccgatttttccctttccttcctctctgttctctcttttttgccatggtctctaccacatccagttttctctagggcagattcaagctgatgttagttttcctttatgctgattatttctatcatgtctactgtttcctggcctcccattcagaaggtccttagggtcagaacaggagggtcagggtgcccttcttcacccaagaggcccaggaggtactgaagaagccagagttagctgaggtggaagagacagggtggctatccctacttcacagatttggaaactgagacctaaagataaatatggcattgggaggcccttatgcttctgtacttcttcatgcttgtaatgatggttcaagatcaagggccttggctctttcatttcccgcaataactaggtcagtattagtcaggactctgttaccgaagatccagaaccagaccttgagctggcctgaggagtagaaggcctcaggcatggctggatccagcctccaacattgccaggagtaggtctctatcttcggatctgctttccgctacactggcttcatcttcaagtagaatttaccagtagaaatggcctctttctcagtcattctaaccaagtcctagataggacagagctctcactggcccagctcaggcctcatgccatccttgtggcctgggaaatcaaatgctctggttggccaggcttaggccctgtaccctctctggtgtcaaccccatccaaaccgcagggacacagattgtgaggaatgaggtttctcaagagaaaaggcaggggccagctactggaagaggaaagagtgggtgccaggaggcagaacagtgggatgttgtgacagggtctctgccttctcatctgtgaagtaagaacgatcatctctgttcctgccacctcccagggccttgtgggactcagaggagattgtgaaaggagaagctgtttgcagatgtgaaaagccaagtaggacggggcacagtggctcacacttgtagtcccagcagtttgggaggctgaggcgggaggatcgcttgaggccaggagtttgaaaccagcctgggcaacattgtgaaggcttgtctctaagaatcttcttaaattagctggatacggtggtatatgcacctgtagtcccagctacttaggaggctgaggtgagaggatcacttgagcccaggattttaaggttagagtgagtcatgatcgtgccacttcactctagcctgggcaacagagcgagaccctttctctaaaaaacaaaaatccccagaaaacagacagagagatacaaagggtgtcataagtctggtgcttacatgagcctcagaacagttttttgctgttctctttgaccacataaaagttagaaactcctgttcaacaaacggcacataacataaagcaaaaatctcacacgcagcctgggaaaagatacttgccatccaaatgggaaaggggtagccttcagaattcatatgtaaagaactcctacagatcagtaagaaaaagttaacaaccaaaaaagcagacaaggccaaggaccagctcttcacagaggagatgatattggcagtgaaaagatgcccaagttcactagaaattggagggatgggatttaaaacaagactcaattcaggccagacgtggtagctcacacctgtaatcccagcactctgggaggtggaagcaggaggatgacttgaggccaggagtttgaaaccagcctggtcaccgcagcaagaccccctccctacaaaagaaaagttaaaaaattagctagacatagtggtgcatgcctgtagtttcagctagttgggaggctgaggtgggaggattgcttgagcgtgggaggttgacactgcagtgggccatgatggcgccactgccctccagcctgggcaacagtgagacccggtctcagaaaaataaaaaaattaaaagacccagttgaatcctattggactgacagaaattgaaaacttgcccggctcacacctgtaattccaggactttgggaggccgaggcgggcagatcacctgaggtcaggagttcaagaccagcctagccaacatgacaaaacactactaaaaatacaaaaattagcggggcatggtggtgggcgcctgtaatcccagctacttgggaggctgaggtgggagaattacttgaacctgggagggagaggttgcggtgagccaggatcactccagtgcactccagcctgggcaacagagtgagactccgtctcaaaaaaaaaaaagaaagaaattgaaaacctgctactacaaagattgggaagatgtgaagccctgggaacccacatgtgctattggtgtgcagggacatgggtacagctaccctgaggggagatgcacaaaccccaggacccaaaaaatcaggggatttgtgagcaaatgatttaacccaagaccccgcagggtagcacaccccaagtgggtcttggtgctgattcttactgcagctctcctactccacacccacgataagccacacacaaagatacaagtaggttccctggtgcctccatgaaggtctagaccactcctcagaggccctagggtctgtacattgactatagcagagaaaccccctccagccatgcctcacagtagggttcagaaggctcttttctgtccccgtttctgtttgctcctgtatggaaagcagctgagactctgggcattacaatcatttggcaatggccgggcacggtggcttatgcctgtaatcccagcactttgggaggccgaggcgggggatcacttgaggtcaggagttcaagaccagcctggccaacatggcaaaacctcgtctctagttaaaatacaaaaattagctgagcatgggggtgggcacttgtagtcccagctactcgggaggctgaggccggagaatcccttgaaacccagaaggcggacgttgcagtgagctgagctgatgccactgcactccagcctgggtaccagagcgagactctatctcaaaaaaaaaaagaaaaaaaaaaagaaatcggccgggcacggtggctcacgcctgtaatcccaacactttgggaggctgaggcgggcggatcaccaggtcgggagtttgagaccagcctgaccaacattgtgaaaccccatctccactaaaagtacaaaaaattagccgggcatggtggcacatgcttgtagtcccagctacttgggagggtgaggcaggagaattgcttgaacctggcagacagaggttgcagtgagccgagatcacgccactgcactcgggtctgggcgatagagtgagactccatctcaaaaaaaaaaagaaaaaagaaatcacttggcaagtggctgagaaatgaagcaacttcatttattcacttaacatttgctagaattcactatgttccggcccccgtagcaggcaccagggtcagctgaatcatacgcagtccctgccttgaaggagccccctgctggaggggcagatgagtgagcacagggagctgtgaccggctctagtggagatgtgcgccagacactgcaggcaaacaagagggcgccatcccctttgtttgggaagctctaagaatagaaccctgtgatgggccttgagctgaggaggaagggcccgggaaagggaatgctatgcgcagaggtgcccagtataacatgtcgtatgaagtccatgccaccccctttggcaggtgacaaactccccagtgagccgctgaccttctgagagcaggaggctccaagaagccacggggaagacccttccttcgtcagagacccaatgcctctatgactcctccttctcttcctgtccttggccaccagcctgtcctccatttctgccccatccacctctgctcaagcgtgggctggcaaagccctgggcttgtgggccacactgctgcagggaacctcctgacatcattagcctggtggttcttctgaaggccctgtgccaccaccttggttgccatggtaaccgtggggtcagctctgaaggagccagccggccggctgtccctggcagatggcgtcattgtggagcttcaaaggcccttgtcacagggcagcagatgtggggatgacgccagcactcagacacacacgtacacacacggcacaaagatccctgggagccctcggagggcggggtggggccaggatggaagtggaggcacctgctgtggcttctctttctctctttttaaaaatcaaacacttgcgtgcaaagcccctaaacggcaaatgggggcctctgcaaatagctccttagaggggctgcagatgaagaggggcttaggtcgggatgtcgtcatgtggcggctgcggggctgggaggcagctgtgggtgggctggagggagggagggtagaggcagatggggcctcccagatgcattgccaagtgtttagtacctggctgcttccaggttgccccctccagggtctcattgtcccaaaagggcttgtttatccctagcctacaacagtttttcctcctggaagtctttagccaggcttcttggagcttctctctctcggcacgtggggcaccttgctcagagcgatgctctgtgctatattagaacattccagcgccaagggaataaacagattgtgtttgacgacatgcaagtaatcccctccaaagtgctcccctcccacacacacatttgtcctgtgccacttgctgtagctccctttttgagattgagattgccttcaagtgggttgtggtgacagactggagggcttcagaggtgtcagatctctttccttgcatggtttattttattttggaggaacagccagaagtcacaaagtgccagttgggccagtatgaccgggatggtttttgcccaccaagaagtaccggatggcgatgacaccctcccattgcgtgctactcaaaacctgtcattcttggagagttgcgcagctcccttaactcaagtggtgctcagggcccttggccagggcttaacctgggtatgagggagagttgctacagggagcctcacccacagacgttcctctctgctgccctctttcatgctttctaacctggggactaatcccccagactttagattgccctgcatggttgtcaggcctgatgatgacctccgcgtctgacttacctgtgtccccagcatccagtgaagggcctgacctggacacaggtgctcagaaatgtgtaagaggcagctgcctaaagaagtgatcatattttcagctgggcgcggtggcttacacctgtaattccagcactttgggaggccaaggtgggcagatctcctgaggctaagagttcaagaccagcctggccaacatggcgaaactttgtctctactaaaaatacaaaaaatagccaggtagcacgcctgtagtcccagctactgtggaggctgaggcagttggaggctgagacaggagatcttggcagtaagccaagatcgtgccactgcactccagctctgtctcaaaaaagaaaaaaaaaaaggtgatcatattttccctagccagacaggatgagggaaaaaagtgatcatatagctacccttattaagcacctactatgtgccaagtaattacatagttacctcttttagcccccccagcaacctctcaaggtagatgattttgttcctgttttataaatggattaaactgaggctcagagaggtgaaaaaactcatccaagatctcacagccagtaaatggcaaggctcggacctgaccccagtgcctgcctctgcaacatcccctacccccagcactgtctcaggagcctctatcttccaaaacaagggctgtcaggggtgttgcagcaacaaagcccccagaagtcatagaactcttggtaggacagacatcaggatcatttgatacagtgactttcatcctgggaatcaggaagaactattagagcaggaaacaaagttttattgtgaatatgcatggtgaaatcacagcttcacacaaaccattaaaaaagccgacgtccatctaaggcagattggctgatagtttgcaagttttcctgcccatatctaacaccttttgttcacctgtttaggcttctgcaaacatttgccagaaactaaggcagcaagtgctgggggcagggaagagggcaggggcattaagaagaattgacaaggccgggcgcagtggctcacgcctgtaatcccagcactttgggaggccgaggtgggcggatcacaaggtcaggagtttgagaccagcctaacatggtgaaaccccgtctctactaaaaatacaaaacttagccaggcgtggtggtgcacacctttaatctcaactacgtgggacgctgaggcaggagaatcgcttgaaccaggaggttgcagtgagccgagatcgtgccattgcactctagcctgggcgacagagcaagactccgtctcaaaaaataataataataaaaaataaaaaaaagaattgacaagagacaaacttcaaactgagaaggttctacccactaagatgatgtgagttggaaaaatgaccatcttggccctggggtggcaggagagccttcccagctcccatatgccgcctcggttctctcctctctgcccccgctaccctgctcagggttccctcggtgtctctcttccctggaccacaagcaccagggaagctccacgagctccaggtttagtcatctctggtctccagatccagtgcatcaatgtgggtaataaataggtgtcaaacaatgagcacatagaaggagaggtgtacaccttggtccacccccaaccaagaagatttctgttattggagggacagaacagaacccatattaggagcttggtgattcaggtctggaaatgtgcaaaacgcttcagttcagatccttccgtggtattccaagctgaactagatcttcaagaaggtgttccagagacagattgctccaaactgggtctgtacagagaggggcctcctggcgcgtgcgttcccagagcaggttcggaggcggaagaggaacgtgagaccgagtgggctccattttgcacaccaggctggtttttatagttgcagagcttctgacttccaacactttgctgacggggaccccttaggtcaggatatttgctacgtaaaccttaacagaattgagaagacagattccctgcatggaagctatctgtacatgaagagaggggctaggaagagtcttccggctgggaatgagggcaggtgggctaacagaaaaagcaggccctttgcagcctcccaaacctggcttctagtgatccttgcttactcggtagccctgtgactgtggacaagtcattccctctctgaccctctgtgtccttgtctgtgaaatgagggtcacctagcagtggcaaggattgaatgagaaaagaggagaaggtgccatctcagacccagcacataataggtgctcaaccaaagtgaggttcttgcgaggtggggtggatgggtattttgcagcccataggaattgtaaaaatgtcagcgggaggcctctccccaggcccccggagctctggaaggcctgataccacacgctctcctcccccacccccagcctttccagggcccagtcaaccacttcccttccccgactacaccccccacctctgcctcctccacgactttggtgttctcatccccggctccagcctgtctgccgctgctggagcctgatgagactccaattcattatttatttcctcatgcggcgcctcctccacacgcttttaaagcagtgctgactgaacggggaaagtgactgaacagttcctgggcacttagggtacagcaggcagctggacagtgtcatcccggtccctgcagtgggccccattctacagatggggcaactgaggctcagagaggtaaactggctttcccagccagggccacagagctgggattggaccgcaggagtgtttactccaaagcccacaatctcgcctcccacggcggtgtgtatggtgcttctccattgcacgctatgggagagtaatggggaggggagtaatgatgcactgggaaggcgttcgtgctggtggaaaaacaggcatttagttcccgctccagtgcggctggaacacatccttctcatattataaggaattaagaaccataatgaaaatgtaagggaaacacacacgcaccccttttaaaggtagacaagctgacttcattctagtcacagtggaaggccaagaagctgacgggacccctgggaggaagttgctggtgggaacagaggggcattatcggatgacgtctgatgaatgccacttcctgcactgccctcagactcactggggcccaggtattgaattgtccttgtttttgtttctggagctgtggctgctgcccagagcagtggtgcatgcactggccgaggtggccctccctggctcagtgaccctgctccctcatccccgacggggaagatcccaccctaggttgtctctgagccttgaggcctggttgggagatacaagagcgtggcagtggcaagggaccaagccactctcagtcaatgccaccacagtcctagggggtgaggattagtcttcctttttttttttttctgagacggagtttcactcttgttgcccaggctggtgtgcagtggcacgatcttggctcactgcaacctccaccttctgagttcaagcaattctcctgcctcagcctcctgagtagctaggattacaggcacctgccaccacgctcagctaatttttgtatttttagtagagacagggtttcgccttgttggccaggctggtctcgaactccccacctcaggtgatccacccacctcggcctcccaaagtgctgggattacaggcgtgagccgccgcacccggccagtcttcccatttttaaaagccagaaaactgaggcactgggagctagggtggcacaagagcacatggatgagaggagtccaagccaattctgccagcctccaaagcccaggccctctatggcatcgctttccaggtgcagggtctccaggcacagcaacttagtggagaggggcacctgctgcctgccccgtccagggtctccccctccaggcccaccttttcatcagcactgccttccccacgcccccggctgacacccctgagcgagtcacctttgccgctgccttgggtgtggaaccctgtgcctttcctgagtagtcattcattccctcactctggaacccacccattggctcctcattctttctctcactcctttatttattcaacaaacacgtcttgtgcacctcccatgtggtcagttgtgtctgctatcttctctcccttgggcattcaggaaaatgagagttttcccaataggcttgaggtggtgagattcagggagctccctcactggccaaaggatggaacccacctctggcctaaggtgctttgccccacaaggatgttcttcatcacaaacacatcttggcaactgcctgagggaacaggacaccctgtctgggcctcagctacctgttctgttgaatgggttgctgtgtaacttcagagggcccttagagtgcgtgggcccccagcggccacaaagaatctgcctgcggtgctgggacactcttgcggtcctgttcctgtatgactcgtcttgccttctgctaaaagtgccagagagagaatggaagttgagacccaaaggcgtgctctggggaataagtaatattttactgatttttctggttaaagtgggtctcaggttgagacaatcccatttcttggccataaggttagagccttccagtgaactgaaagattaagatcaggtttcatttactgagcatctactaggtgctaggtgctccagatgtattttcagtagagccgcaggggttttctcgttttatttttatttttatgtatttattttggcaacagagtcttgctctgtgacctcgcctggagtgcagtggctgaatctcgactcactgcaacctccacttcccaggttcaagcaattctcatgcatcagcctcccgagtagctgggattacaggcacctgccaccatgcccagctaattttcgtattttcagtaaaaacagggtttcaccaagtgaccaggttggtcgcaatctcctgagttcacgtgatcctcctaccttggcctcccaaagtgcaggggttgcaggcatgagccactgcacccggctggctttcctgttttatagatgaagaaactgaggcccagaaaggctctcccacggctagaattagtaagtgatgccacgatgcagcctccaaaggctgggtgctctctgctgccatggcaggaaagccgggtggactccccagccctcacctcatgccaccctcaccatgtccagcagggaggtgcacacctcccagccccagctttgtcctggactcccctggagaggcccagctctcctcgctcctctgtgtgaacagcaacaggctgtgggaactaagtgtcacgactgcaatttgctttcttttcagtttcattcattagtgttcctcccaggccccatccccacagcccagggaaatgccaatcagcgtcttccctcctgccagcggcacccctgccctcccctccgtgagttcctgagatcccgccagcatctcctccagcttcagaatatctgctgttggatcccattgttcccacatcatcccaggaatcctaaatggcaaagcctgtcatcttgctgccgcccatgtagggcctgaattccaaggcagacacaccacctggcacagccttgtggctgcatctccccatgttccagaaggtatggtgaccttctaagacgagggacagccatgaccagccacttccctgagcgagttcaggtgtgagaacgccctggcactgggcatttctgaatctttccatatgtcagaatccaggaagtgccagtcctgggagcaccagaaccctctcctgtgactctacgtcacctcatgccagtcacctcctactgactgccagtgtgtcagggaggcctgaaggatgagagataaaataatgaaagcagggccgtggcaatgtgggcctggccactagagttctctcagcatttttttttttttaagtcacggggccaggcatggtggctcacacctgtaatcccaccactttggggaggccgaggcaggcagatcacttgaggtcaggggttcgagactatcctggccaacatggtaaaacccagtctttactaaaaatacaaaaattagctgggcatggtggtgggcacctgtaatcccagctacttgggaggctgaggcaggagaatcacttgaactcaggagtggaggttgcagtgagccgaggtcaccccattgcactccaatctgggcgacaagagtgagactcaatctcaaaaaaaaaaaaaaaagaaagacatgatcttgctctgtcacctaggctggagtgcagtggtgcaatcatagctcactgcaggcttgacctcctgggctcaaatgatcctcagcctcagcctccagagtagctgggactacagccaccacacctgtccaatttttttattttttgtagagatggggatctcactgttttgcccaggatgggctcaagctcctggactcaagcaacccttccatctcccgaagtgctgagatgacaggcatgagccactgtgcccagctgagttatctcagctttgaggaaacccccctggaatgtgtgaggatttcccctcccctcacctcctcaagtgaacagtgaccagccccttcaacagatgcggggtgatgggggcacgttgagcaaaatcagtagatactcataggtagtctgcctcagggttcccccttagccttcaggcttgcagtcactcaccctgtgactgagccagttgcatagcagtttccatgccccagggcctcagtttcccctcaggcgatgtgctttcctgtgtacctcaatacacacattgtctccctctggtctgggccagccccatgaaaggagagttgagactgggtgccaggtgtctgtgagtcataagcatttgggttccaaattgtgtgtagatgaatacagatgtgttttgtgtgtgtgtgtgtgtgtgtgtgtgtgtgtgtgtggttattttttattttttgcttcattgcacgtaagtcacattttcctatcttctgatccaagctctaaaagcgttttgtggtataaaatctcccatcatctgatccactctaccgaaataaaccagctcccctgccgtcatcttccctgaaaagtccccctgcgtcatgttctgaggccggcagggaggggccttgcccacttaaaacacttcaccataatccccccagcgcccccagtcctctccactccctggggggccgctccggtttcctgggctgttattactggaggaccagctgctaccctgccacccatccatacagacctggtctgtccatcctgggcctcacaggcccccgcttagctcatctcatggaaatatcatttaaaaaaataaacactggtttgattcgcacttccctctcgcctttgctatgtctcccagcctcccaccactgggcaccagttcatctattaaggtgttcttggctcccagagttccccacaggttgcaggtcagtagctggccgtccacctgtggtgcctctggggctgctaatgtcctctggggccacacaactgtttatttcttctgagtcctgtggtcatttaaatgccccttaaatgtggcatgggggaaagagtgagtgccacatgcactgtgtgacctcggacaagttacttccctctctgtaccccatgggtacctcagtgaagaggcatctccttcatgggctgtagggctcctgctgctccgaggcctatggctgctcctaggatgggaggtgttggttcttataaatgacataaagtagatgctcaagaggaaaatatgcttaaagttttcttgcaaggtctggaacagtggttcatgcctgtaatcctagcactttggggggctgagacaggtggatcacttgagtccaggagttcgagaccagcctgggcaacatagcgagacctcacctctacaaattaaaaattaaaaaaaattagccaggcatggtggcatcacctgtaatcctggctaccccggaggctgaggcaggagaatcacttgaacctgggagttggggtctgtggtgagctatgatcacccactacactgcagcctgggtgacagagtgagaccctgtccctacaaataagtttccttgcaaaccttctgtgaacttcatttgtcttccatcatccatgctttgattctctgaagtcatcagaaggcaatttgtaggccataacattttgagtaaaacataacgttagtttgattagtcccaaatggtgttctgacaactgcaaagctttgtgattcaatcaggtgggtgttttgtgcctgagaagcaacagggtgtcacattaagagcacagactccaaagttttgaacccctattcagccacttgctgtggcattggacgagggattcagggtctctgtgcctcagtttccttggctgtgaaatagtctaagaatagtacctactgcctagggttgagctggggattcactggggtggtaggcatggagcactgtaacccacctggcccagggaaggtgctgtgtaagtactgtgtattttgttgtggttagtatattatgatgtggcagacagttatgaagtacagacataacaggtgacattcattatcctcctgctaccgccattctcaaccaggggcaattttgacatctggggacatttggcaatgtttggagacattgtggttgtcacagcgtggcggggggggggatgattggcatctcctgggtagaggccagggatgctaaatccttctgcaaaggacagcccctgtggcaaaaaattctctggccccaaatgtcaatggtgccattagaaaccttgccctggccaggcacagtggctcatgcttgtaatcccagcactttgggaggccgaggcgggtggagcacgaggtcaggagatcaagaccatcctggctaacacggtgaaacacccccaccccgtctctactaaaaatacaaaaaattagccaggcgcggtggcaggcagctgtagtcccagctactcgggaggctgaggcaggagaatgccgtgaacccgggaggcggagcttgcagtgagctgagatcacgccactgcactccagcctggaagacagaaaaaaaagaaaaagaaaaagaaaccttgctctaatagaagctttctggtagcaccaaaggcctctctgtcctttgtagcacttgccttggctataattttgcatttattggtatgattatttgcttactacccatcaagtcccaggatgccatttcttggctgtgtgaccttgggcccctgggactgcctttcagaacctccatttccttcatctgcaaatgggattgtaaatatgtgataaattcagagttgaggttaagaccacaggctccagagttaagacgtacctgtgttcaagttgcatctctgctagtggtgaacttaggcaagtcacctgatgaacctcagtttcctccgctgtgaaatgggtctaataattcccttcctcattcagagggtgaatatgggaattaaaggagctcataatggtgaaaattattttattattattaaatccaccatccaacaactggttttctttgagccctaagtatgttccggacttggtgactatgtagtgggtattatgggcttaacgggcaatgtctgccttgcagagcccatcatctcatgatgtgggaggggtctggcctggttcatcctccagcactgacttctgacactcccaccccacccctgccctcttgcagatctgtgccatcattggcgggaccttcaccgtcgccggcatcctggactcatgcatcttcacagcctctgaggcctggaagaagatccagctgggcaagatgcattgacgccacacccagcctaatggccgaggaccctgggcatcgccagccttgcctccagtgccctgtctcctttggccctcaatctggtcccaaatctggctgtgtcccaaagggtgtgtgggaagtggggggaaagtagaggatggctcgatgttttgcagctacctcttttccccgtgtttctttttagacaaattacactgcctgaagttgcagttcccctttccctggggagccccaagaacagagtcaggcaaggggtggggagtccagggatcttggggacccctcctaggagagctgcagtctcttccctcaggggaacatcccagaatgcatatcgatcagctctcagccaggcttcgacaatctcgcagcccccactaggtggacacattaatgatttggtttctcccctgggcagccaacctgccccagaggcaccagacctgggctttcagctttgggaccaggctgcccaaaggtactcctttatacacccggcaccttccacgaaagatggtacttcccaagcaagcccctatgatttgtcactatagatggaaccctgacttctgccccatcccttcctgcccaacctagaacccaggcctcaagtctttaccccacccctttcttgttcttccaagaagcagatgcccagttgctcagcagcagcggtagagacttgaatctgcccaccagtcacaaggcgggtcacagattcctcttcctctcttctcctcgttcctctgaaccctccaccaatgtgcctcagcctgtgtgctgtgtggcaacagcattctggttcccactgccaagatctcccaccactctgctgggatctgcagtggcagggagtgggggttgtgtaaaggggaagtcatcttttgagatccagatagacatggtttgtgcacttacgtccagatgggaagcatccttcctgcaaccctaaaataatcatgcagcctctcagacggacgccatcggtcccaaggccttaggtggaggaagcaaagcaggccaggcctgtcctgtccgtggacctctaccttctggactccctacgggtgcagagcacttgggtttctctacagccatcgtggcccacttgacactgtgctcctccatcagctggtcacatgccaacacgttcccagcccctgaggcagctccagggtgccccacctgctcctgaggtgggtccctaccctgctgctcctcttcatcctttcccttttgtcctgaaagggaggagcaatggtccaggcattaattccacccagggaattttagctatgccctcatgtcccagggagagagccacacgcctgttttccatttatagcaagattgtttgcatacttttgtaatgaaggggagtgtccagtggaaggatttttaaaattatcttatggatagctcaagtctctgccatttgtaatttttggctctaagctccgattggagacgcttctccttgtgcatgtgagttgactgatgttgtgagtgtaaatgcatttggttatttctggtatcggtggccacttggatggatttttttacattctgttccccagttacaggaaggagtccctttggtgtgtgaatatgtgtgcctgtagagggtggggcagggtggggtggggatggaaatgtgtggcatgcacatgagttgaaattcttttatgcatttttttgaagaaaaaaaaaaaaaaacaactctgaggacataggggatgtcagtttcctatggaagagacacctctgacccgttattcttataatcaaaatctgaagggaaaaaaatgttttagttctttccccactcgttgggttcaactagattaaaaggctgattttcagaaatattatggtgtgattctttctaccttgactggggctgggtgacccaaaggctggaatcacagccagaatggaattcacttctagaggagagaaggtagaagagttgaaaaggagatctgtgaggatgatcagaaagtcaaaccccggccaggcacggtggctcacgcctgtaatcccagcactttgggaggccgaggtgggccaatcaggaggtcaggagatcgagaccatcctggctaacatggagaaaccccgtctctactaaaaatacaaaaaatgagccaggtgtggtggcgggcgcctgtagtcccagctactccagaggctgaggcaggagaatggcatgaacccagaaggcagagcttgcagtgagccgagatcgtgccactgcactccagcctgggcgacagagcgagactccatctcaaaaaaaaaaaaaagtgaaaccccctttggccaggtgcagtggctcacacctgtattcccaacacttttgggaggcagaggcgggtggatcacctgaggtcaggagttcaaaaccagcctggccaacatggtgaaaccccatctctactaaaaatacaaaaaatagctgggcgtggtggcaggcacctgtaatcccagctactcaggaggctaaggcaaggagaatcgcttgaacctggaaggcagaggtttcagtgagctgagatcgcaccattgcactccagcctgggggacaaagcgagactccgtctcaaaaaaaaaaaaaagaaaagaagaaagaaagtcaagcccccttagattaagtcattcctttattgagtccctacagaatgttcttgggtctgtcaccttctagctgtgcagcttcagtccaggtccttaacctctcagtgcctcagatttgttgggtgaaaatgaggatagtaataaaactaccacatagggctgtttcagaaatagaatctataacgtgcacagaaattatattagaatgagattgtctatgtagaagagtgtttattgctggtacacagtaagttttcacaaatggtgattggaccattatgagcattcccaaataggatataatcttgagaaaagactaactttagagctttgagctaagggctccataaatgaaaggtgattcataaattcttcttgatttcaaaggacctggcactcctttttcaaccctaagctcagcaatgagagatcatcatcagctatgagcaatggacttccatggatctttcccatcttgctgccaagtcctacaagactttcatcagaacagccctaacacggataaacacaccagggatgaatgtgggagggaatcagtctgtgagaaattcttaactctccccatgctctcgctcttacatcctgatacttgagttatgtgtgttcccaaacgtgtttataccagttgtgcttttatactggtaggatgtgatttggggaactattagttaaaccaatgagctacaagaaatgaacctagtaaaactaagttgaatgctttagagagacttgattaaggtgagttgttacccctcccaactcaaaatgctgctgaatgagaagtgaacaagacaactgtaaaagatttgggaggccggacgcgatggttcacgcctataatcccagcaccgggaggctgaggtgagaggattgcttgagcccaagagtttgagaccagtctgggcaacatgatgaaaccccgtctctatagaaaaaatacaaaaattagtgggcgtggtggcctgtagtcccagccacctgggaggctgcggtgggggcaggggcggcgggggggaagtggggggagtggtggaggctgcagtgaaccaagatctagccgctgcactccagcctgggtgacagagtgaaactctgtctcaaaaaagagagaaagagagagggagggagggagagaggaagagggaaggtgggtgtggagagggagagagacagagaacggaacaactgaagatttttggttggtttatgtaaggaaaatggaggggaacaccgatacaggtttctctgtaaggtagagccttagcccagggtcattgtcgaatgtgttttacgttggcatacaacatttaagggatggatgccatttttattatttctcctttcaatgaacttttccaattgtctaaccagatgtggattacagtggtttcatataagaggatttctaaatcaggattacagagcaaaaccctccaggggtgcgtgacaggttgggagctgtggtgggtccaggcagaaatggcttccctgggaagttgcggaagaggcgtctctggagacgtgcttcgtgaggagagaagctgaagtgttgcaaacaacactggttggggtgggtgaaacctgggaagagggggtgaaacctgggaagaaatggggtgtggcactagagttcataaatagtagctgtggttagtttttttttttttttttttttttgagacggagtcattgcccaggctggagtgcaatggcgcgatatcggctcactgcaacatctacctcccagattcaagcagttctcctgtttcagcctcctgagtagctgagattacaggcgcccaccaccatgcccagctaatttttgtatttttaggagaaacagggtttcaccatattggtcaggctggtctcgaactcctgacctcaggtgatccacctgcctcagcctcccaaagtgctgggattacaggcgtgagccactgcgcccagcctgtggttagtttttattactatatgttacaaataatttttaaattcttgccggaaacaatgtgggaggccactggaggtctcaatcccttcttaagaaactggtcctttattccagaaggttcattagctgctgcggcagttagatgcagtggtccaggaacgtgagtggggatgtgtgtggacaagaatactcactggagacccttttttcttgccctagcagttgtttcctgtcagttatggagtgatgaggtcacgcacttcattctggccagtcattaatatgatttggcattctctgcatgccaggcaagagtgactgctcttcaggccagatcttccttcgagatggatgttatctcctttttaggaaggaggaaacagagagacctcgtaacttggcatggccacacagtgagtcacacagttagtaaagatggaattcatacccaggtctgcctgactctgggattacgaagaattacatggttccacctcagtcccaaggtcatctttgctgtgccaaaagggaaaactggaaataggggtggtcagagcaggaggtgctttttttggttttgtttttcctttaaaacaacctgcagagaaaatctaaattaaacattcgcagggacagcgttcttacaattttttaaatcttcaaaatgtaattttaattacacaaataacacaggctcataagcccactggaggaaaattatcaaatactaaaaaaagtaaaaggggaaaaacgaaagtcacccgtaatcccactaatcagagatgatcatttaatgataacattttagtgatgccttttgataagcaaaatgggatcatactgttcatattattgtatagcttagccctcacttaacagacatcttcctagattaataaatacggatcgcattattatctttatgggctgcaagataaataataaccatattgagcatctaatggtagattatgtccatcctttgttcccatctcactcagagcctcagttttctcacctgtaaaagggacaattcatactgttatttaacggactgaaatgaggtaatgcttgtaaacctgttagcacaatgcctgacagtaaatgctcagcccattaagaagagccattattatccatctaataaataaataaattccaacatttattaagttcttcctctgtgccaggtattgtgctaagggttcatttaatcctgacaccaggccgggtgtggtggctcacatctgtaatcccagcactttgggaggctgaggcaggtggattgcttgaggtcatgagttcaagaccagcctaaccaacatggtgaaaccctgtctctactaaaaatacaaaaattagccaggcgtggtggcatacgcctgtagtcccagctactcaggaggctgaggcaggagaatcacttgaacccgggaggtggaggttgcagtgagccaaaactgcaccactgcactccagcctgggcgacagagcgagactctatctcgaaaaaaaaaaaaaatcctgacaccaaaccaatgaggtaagtactatcattattcccatttttcagatgggaataaactgagtgaccaagaggctgaatatcttctccaaagccaaagaaccaggcagtggcagagatccaaacccaagcgatttgggtgccagggctcaagcacttccccatgcagccactgcctcgagaaataaaaagactcaccagacacttcctctgtgctaggtgctttgagttcctgcgcatgtttccaggggtgggcatgagacaagacagccagtctcactacattgttagaatgacagcctccagctcttgtcatccaggatatcattgtgcctgttttaattttactgaaccacacagcatgttaaaaacaaaacaaaacaaagcaaaaagccttccctgctctgcttgatcatggatactccttgatgatcttgggttctcaagatctgtctttacatggctttccttcaccagtgaggctctgaacttcttgggagcactcctccccagatctctttaatcaagacctgtacctggctccatgtaggtaccaaataaattgatgagcaaatgaatgaatgtatgagtaaataagtgggtgaatgacaataaatggatatgtgatagagaaatgagtgaataaacagaaccagtgagtgagtgagtgaatgaatgagtgaatgaatgaatgaactccttggggcagggcatgggtttgactaacacctaaggactattctaagaagaacctctgacctttactgtgtgtgcgccgttatgccagcgtctgctcctgggttgccgataggtaatgacttcctttcttaggactgccccccaacctccttattcttggagcctgggcacacgcacagctgggtggcccttcagctgatactgccttaactgctttaactctgcctgctgtgctgtccaggcttctgcaaatagcccaggtgtggccatcctccagaggcctccaacattaactgtgaagggcccggaataaaacctagtattagtaggccaggcgcagtggctcacgcctgtaatcccagtactttgggaggccgaggcgggagaatcacctgaggtcgggagttcaagaccagcctgaccaacatggagaaaccccgtctctactaaaaatacaaaattagccgggcgtggtggcgcatacctgtaatcccagatactggggaggctgaggcaggagaatcgcttgaacttgggaggcggaggttgcggtgagccgagatggtgccactgcactgcagcccagggaacaagagcgaaactctatctcaaaaaaaaaaaaaaaaaaaatctagtattagtaaacgcaggtgtttaacaatgtcaccactacatgtcagggaacactgataaactaagagagagcacgggacctgcctgggtgtggctgctgtacttgcaagacatcttccctctctgagtttcagcatgccggcatttggcactaagttgtcgttcaacatatatggaatgaatgaacgaaagggagagttggagttaataacaccttgcatagaataaaccccgtcggttcttaacccgaagagagtcgagacccagagcccttttccttccctgccgccacggtgcccacggagggggcgtggttgatctccctcacagctccgtcgggaccagagacccggggaccttttacacccagggtcnnnnnnnnnnnnnnnnnnnnnnnnnnnnnnnnnnnnnnnnnnnnnnnnnnnnnnnnnnnnnnnnnnnnnnnnnnnnnnnnnnnnnnnnnnnnnnnnnnnnnnnnnnnnnnnnnnnnnnnnnnnnnnnnnnnnnnnnnnnnnnnnnnnnnnnnnnnnnnnnnnnnngggccggcggccccacaaaccccgcaggcacgccgccggccgccgtttagtccccagagatagaaaaaagtagaggtaggagggcgcggcggctcacgcctgtaatcccagcactttggaaggccgaggcgggcggatcacgaggtcaggaaatcgagaccatcctggctaacagggtgaaaccccgtctctactaaaaatacaaaaaattagccgggcgtggtggggggcgcctgtagtcccagctactcgggaggctgaggcaggagaatggcgtgaacccgggaggcggagcttgcagtgagccgagctcgcgccactgcactccagtctgggcgacagagcgagactccgtctcaaaaaaaaaaaaaagaacaccagtaagcctctaccgcaggccctacacaagcaggcccttgtactcactggcatcgccctcccggggccgccaggaatgaggcactgagatcccaccccaagccgctgggggcgccattcgacttcgctcctacggaaatggggcttcgatgtctttctgcgcttgcgcggcacggaaactcacttccggccctgcgcactcagggtctgaggcagctagtagccgggtgagtggaggctggagttttctcggacagtgaactctaccgccccgtgagaccctgccctatgtgtcgcgggaacacatgtcaccccacagctctctttgagtgacctcccgaccacccattcctgcctaaccctagcattccttcctcagcctcaaggtcccagtgctaccctctcccccacgacccctttagacgggcatgcgacctccacacacgcctcactttatgtgatagtcagactagtcgcatctctctgtcctccctcagttgccttttcagaggctacctcccctgtagagcctttgttgggggatgaggagtgtcttgggtcgagaacaggcccctgtaacccactgagcgccccttcattccgtctctctccgccctttgtagagggtcaccatgaagttcaatcccttcgttacctcggaccgcagtaaaaaccgcaaacgtcacttcaatgccccctcacacgtgcgcaggaagatcatgtcatccccgctctccaaggagctgcggcagaagtacaatgtccgctccatgcccatccgcaaggacgacgaggtccaggtacgtctccctccggcgctagtggcgctcggacaccgttgcctaagaacgtcatgcgtggagcagtcacagactcacatgcctcaggactctggaaagtagtgtgacccttcagatgtgttaggccagagatagggttcagagccaccagagagtgcctgcgttgctttagagcatttaattatttaatagtaatagtaaaatttaataaaacagtatgtcaaccaagcaaaaacctgcttttttgtttgttttgtagagatagggtcttgctatgttgcccaggctggtctctgaactcctggcctcaagtgatcctcccacctcagcctcccaaagcactgggattacaagtgtgagccaccgtgccccgccaaaaatacttttgatttaaccttctggctgctagtttgccaagtgttgttgcccagggtggcttgttgaaccagactgtaggggaaggtgctgcagtgagagtagtgttttagtatatttgggtgtagtgggattgatggacagagatttgtgggagctggccatgtgatagcattggatttggcaggagaactggtaaagatgcagcgagtcactctttcataatttctaaaagactggcccatgtgagaacgtacaagccctctgttctctgtgattggagcttagaatgcatgagaggagggaagggagttggatatgagtgaaataagcaggggctagattcattcctcaaaggaatatttatggagcacttaccagagattgttctaggacaagattgacgaggcccttgttctcatggagatcacgttttagagcagggtttcctagcctcagctctattgatatgttggactggataattgttgtggggggtggggggtgggggctgtcctgtgcattgtagaatgtttagcagcgtccctggcctctccccactagatgccagtggcactccctcccttcacagttgtgacaagcaaaaatatttccagatattgccaaatgctccctggggggcaaaatcaactcttccctcactcagttaagagctattgtcttagagaatgaaatgacataaggtgatgaggcttggtgtatcatctgagacactgggactctttgaaggtttggggatatgttaaggaggaaaaaatgtggagttaagccggaagtgtgacaggaagagtggaaagagtagttcagaggtatgatcagcagtttcaaccccctctctcctggatccttcccatcagacatgttctagaatgggggaattgcaaatacttataggggataggtagggatagaaaatggcaaactggaaagctcaagcctcacatataagatataatcatctacctttagcccattgatgcctgggggaaatgcaggcccattgttagattcttggattttcaaagagagctggaaaatttggattcacttccctagcccacatttccttccagctactacactttgttctctattcataaccaacctcctcaagagagctgtctacacttcctcatctcccattcactcttggattctcttcagtctattccctgtccccactacattatagaacctactttgacgtagatcactaataatcccttcgtgactgaatccagtggacacatctagcatctctttctgctctgtgttctctacgtaggtaaagaataggtaataatccgttcttagagctttaaatgtctgctgtgtgctaacaactccctcttttatatcccagtccagaccactttagacaacctgtatatctgactacctataacacagacctatagatctgactacctactgaacatctctatttaggtagcccattgacatttcaagcttcttaagagtactcttgatcctaacactctcactgcctccagaatccaactctactcccatcttccacatctccagtaagtgccatttatatctccccagctgcatatgcccctaaacctttgttatctttaacaacgctccttaaccccctcttgtaatctaccatcaaggcttgttgattctacctccaaagtaagtcttgaacctatttcctgtccagttcaaggcagcattgcagttccctcttttacctttgtccattttccacagagtggtattatttgcaaatcaggtcctatttaaaacctttggcaggctgggcatgatggctcacgcctgtaatcctagcagtttgggaggcccaggcgggtggatcccctgagctcaggagtttgagaccagcctgggaaacatggtgaaactccatctctactaaaaatacaaaaaattagccaggcgtggtggtgcacacctgtaatcccagctactcgggaggctgaagcatgacaatcgcttgaacccgggaggcggaggttgcaatgaaccgagattgtgccattgcactccagcctgggtgacagagtgagactctgtctcaaaaacaacaacaacaacaacaaaaaacggccaggcacagtggctcacgcctgtaatcccagcactttgggaggctgtggcaggcagatcatgaggtcaggagattgagaccatcctggctaacacggtgaaacccatctctactaaaaatataaaaaattagctgagcgtggtggtgggcgcctgtagtcccaactacttgggaggctgaggcagg

SEQ ID NO: 160 - DNA, 1835 bp, Homo sapiens
gcctgcccgcgggcccctttaaccgggtggcggaaggggcggccgggcgggcggcgcccaatgggctgcgcggagcgtcacttcccggcagcgggaggcgagtggcgagtggcgagtggcgagtgtcaggggggcggccggcgggggcggggcggccggaggaggcgttggcagcgggctcggacccacgcggcgccgcggcccgcctggcctgcagcgctcccacccccggcggcggcacgatgccctttgacttcaggaggtttgacatctacaggaaggtgcccaaggaccttacgcagccaacgtacaccggggccattatctccatctgctgctgcctcttcatcctcttcctcttcctctcggagctcaccggatttataacgacagaagttgtgaacgagctctatgtcgatgacccagacaaggacagcggtggcaagatcgacgtcagtctgaacatcagtttacccaatctgcactgcgagttggttgggcttgacattcaggatgagatgggcaggcacgaagtgggccacatcgacaactccatgaagatcccgctgaacaatggggcaggctgccgcttcgaggggcagttcagcatcaacaaggtccccggcaacttccacgtgtccacacacagtgccacagcccagccacagaacccagacatgacgcatgtcatccacaagctctcctttggggacacgctacaggtccagaacatccacggagctttcaatgctctcgggggagcagacagactcacctccaaccccctggcctcccacgactacatcctgaagattgtgcccacggtttatgaggacaagagtggcaagcagcggtactcctaccagtacacggtggccaacaaggaatacgtcgcctacagccacacgggccgcatcatccctgcaatctggttccgctacgacctcagccccatcacggtcaagtacacagagagacggcagccgctgtacagattcatcaccacgatctgtgccatcattggcgggaccttcaccgtcgccggcatcctggactcatgcatcttcacagcctctgaggcctggaagaagatccagctggtcacatgccaacacgttcccagcccctgaggcagctccagggtgccccacctgctcctgaggtgggtccctaccctgctgctcctcttcatcctttcccttttgtcctgaaagggaggagcaatggtccaggcattaattccacccagggaattttagctatgccctcatgtcccagggagagagccacacgcctgttttccatttatagcaagattgtttgcatacttttgtaatgaaggggagtgtccagtggaaggatttttaaaattatcttatggatagctcaagtctctgccatttgtaatttttggctctaagctccgattggagacgcttctccttgtgcatgtgagttgactgatgttgtgagtgtaaatgcatttggttatttctggtatcggtggccacttggatggatttttttacattctgttccccagttacaggaaggagtccctttggtgtgtgaatatgtgtgcctgtagagggtggggcagggtggggtggggatggaaatgtgtggcatgcacatgagttgaaattcttttatgcatttttttgaagaaaaaaaaaaaaaaacaactctgaggacataggggatgtcagtttcctatggaagagacacctctgacccgttattcttataatcaaaatctgaagggaaaaaaatgttttagttctttccccactcgttgggttcaactagattaaaaggctgattttcagaaatat

SEQ ID NO: 161 - protein, 295 aa, Homo sapiens
MPFDFRRFDIYRKVPKDLTQPTYTGAIISICCCLFILFLFLSELTGFITTEVVNELYVDDPDKDSGGKIDVSLNISLPNLHCELVGLDIQDEMGRHEVGHIDNSMKIPLNNGAGCRFEGQFSINKVPGNFHVSTHSATAQPQNPDMTHVIHKLSFGDTLQVQNIHGAFNALGGADRLTSNPLASHDYILKIVPTVYEDKSGKQRYSYQYTVANKEYVAYSHTGRIIPAIWFRYDLSPITVKYTERRQPLYRFITTICAIIGGTFTVAGILDSCIFTASEAWKKIQLVTCQHVPSP

SEQ ID NO: 162 - DNA, 26804 bp, Mus musculus
gttgcttggttagtccctctggggtttccccctcctgataactttgtgcctcctggagttcagtctctgtgttctttctttttcatttgctcatttatgttccctggctggtacagcaggctggccttgaacttgcagggtccctcttacccctgtctcccgagatctggaatttcaggcctgtgcattcacacccagccatggactttattacagttttgtatttagctcgaatgaagcccaggctggccttgaacccgatgtcgagcctaggacagccttgaactcttggttctccagagtgccgagatcacaggactgcagcaccacaccaagctcatggtttacttcagctggggctgtggtgggtctccactggggatccgggaggctcttaccagctcctatccctggctcaggccgtcttctggactgagcagtgcaggatgtggggctgggctggcaaggctcctgcctgagtcacggggcgtgaggcagcctgagtcaggccgggagggaagtccctgcggaaggggctttcacagtgtgatggaatctcggggaaagagaaagtgtgttccatgtccctttgacacactgaccttgtgtgagcctgagccatgggcacccagcctccagctccagatgccccaggcactgggaggatcagttaccctagcctccctaggacacagccagggccccagcatacacctgtccacagagtggcagtattagaatgacccttggcagtcttccaagccaccttacaggtcctttgtgtcaggtgtgcccaggtgctagggcaggcagtgaaagttcctcaccctgctgcccccaggttgtccccaaatgaacttttcccttagatggcggaaattctgaacacctaatctgtgccaggttttcaggacctgagctaagacagtgaacaaggtatgtttacacttgccttgccaagcgcagatgtcctggctcacaggggtttccacacttagaaggcagaggcaggcaggtatctgtgagttcaaggccagcccagtcttgaactagtgagaccctgcctcaaacaacaaaaggagagggcattctgggctcagggatcgcaccagcaagccataaatacagagaattatctaggccagccactgtgctgcagaggttcaggctcacccaaggaatgttgaatgttcttttttagttgactttgttttttttttaaagacttgctcattttatgtgtgtgagtattttatgtttgtgggtttgttttggaaacagggtctcacggtgtagccctggctggtccagaactcactatgtagaccagattaaccttgtaaagaccaagtgggttgggattaaagcttgggactgcctattgcttttagatttttttgccacaatcctcctgcctcagtttcctaagtgctaggattgtgtgtgtgtgtgtgtgtgtgtgtgtgtgagagagagagagagagagagagagacagacagacagacagacagagacagagacagagacagagagagagacagagagagaccacatctaaacattctagaagccacaacaaaatgtaaaaaaaaaaaaaaaaaaaacaacaacaacaaaaaaaaaaaacctgaaatcacctcacagagcaggaggcagataccctagctggtgaacctgcatggcaggaagagagacctgcacctgaatccatcgtcctggaggctacacatccagcagctccctcctcaagtacaataaagggtcacatgttgggggaggggctggccctatgtgctggccagggcagtggggacagcatcacaggaggactggcatccctagagccctcagctttgacctgatccttgctgggcccattcccttctctaaatgatgtgtgtgtcgggggggtgtcccaaaacaacacggtcccccaggagatttatcccacctccccagctgcctgagacacccacaccaaggacggcctaagatgccccaacctccacccccaccatggcccctggacctctcacccgtcctttgtgagatgcactaactcttgggtctcagcctgactgtatgactgctgagatcttaggaagggaggtacatttccaggggaggccacccttttcagacggaccttgtgtgagccgggacatcaggtgggcaacctcaatccatctctgtgggaacatgtcctttttctgctctgtcttccggcagcagatcctctggaagaggagcccatctgagcagtaggctggaggggcaggctcctgccaaacaagagagaccattgttggtagggggctttgagtcttttttacatcagttctaccaacccaggaattctctgatggtcagcacctagcccctccttgggggcccctgagctcgctcagggctgaggctgctgccagactagaggtgggggatgggaacacgccccaaaggacaaggacaaaggcagcagaggggcatgagcttcagtggcagagcgcacatgctcctcacccaggcctgggaactggcagggcaccctggatggtgacccagaaacctggctgtcagcggctcccgcctagcactgcccccaagaactggaatggctggccagtgtcagcatgactatctcgggattctctgttcaccccaccagatgatttagggctgtagaggatccccagtgcgagttaacccacgcctagagcccactgcctgctcccaggagattttatcttggcgagccactgatgtgtggtgctgtggttaggtccctagaaaggagaatgcaaagaggctgcctgagccagtctcaagggagactgggtcctggaagtcacagtgagccctgcagtggggacaggcctggcaagcacaggatggatgaagaccaggaagatgggaaagcagggctctctgctgcccgctccaggctagattccaggccaacttcacagctccagcccccacccccatctcctaccaggagctagctcccctcccttatgcccacccccagctacctacctcctccagccctcaggaggccttcagcccacccatccattcaccagacttacactcacagttaggccttgggcctggtgtccagcttgctggggttgaagatgaagaaaaccaagcctaggagattaataaatcccctggagtgtgctcactgccccgccccgcaagacctgctggtccctccacaaccaccgtgctcactccctaacacttgcctcttgtttgactacacaacgtttttgtgcttctacaacctgattggtagacaccctacacacacacacatatccaggccacatatccccaaacagagaccaggactgttttctcaaccctgagaaaggtttcaaggtggcctggggtccccagtctaggaaatacacgggctctgaattcaataggtggctggtacctctacaagctcctttgggccaaaggaaaagtatttgatcttcaaagatctcactcagtcaggcatggtgatacactactttcttcttcttcttcatcttcctcttcctcttcttcctcctcctcctcctcctcctccttcttcttttttttttttttttctgagacagggtttctctgggtagccctggctgtcctggaactcactctgtagaccaggctgacctcgaactcagaaatccgcctgcctctgcctcccaagtgctgggattaaaggcatgtgccaccacccggcggcagtcagtgctcttaaccactgagccatctctccagccccaagtgatatacctcttaaattccaacactggggggggggggtgcagagacaggtgggtctctaagttcaaggccagcctgacacagagaaaccctgtcttggaaacaaaaaaacagatgctgctgctgctgctgctgctgctgctgctgctgctgctgctgctgctgctgcaaacaacaatacaacacctcagacttccccagctcagttctccttggcagctagagacattctctctctaatgcccattgagcaacgatgtcagtccctctgataaaaggctatggaactgtcaggtgaagacaggagatgacaccttctcatggtgacaaaggacaggtgggctcctcctgagggtgcaggagccctgtcatgtctcaggctagaccatcctaggacagttagtcttctgccttcagtttgccttgagggttagggataggtgtcctggtactaaataccaatggatagcagacactgaacactgcgcttggtcttgggcagactgcacaaatgatagggcatacagtccttgtcttgtctctccagacaagaagagcattcggaccattcactgacaacagttaaatagacagggagggaacaggcaggcaggtttttgttgttgttattactgctgctgctttttaaaataggatacactatgtattactgactgacctgaacttaccatgtagaccaggctggccttcaaccggttgagatctgcctgtgtctgcctccggagtgctggacagaaggtatgcatcaccactgccagacttcacgccctgaggctcctaagccagaagaggtcttgcctttcaggtaggaagagattcagaacgggtgcttacagaactgctgggaaactggaggagcaggctggacctcctagaacaggcctgagctgctggcctctgccccagtgaaggcagggacaggaagcctgcctgtcaccatacctgtattctgaccccataaacactggcaactgggcgttcctcagcgctcctggtgggagcgctggagagccgcttccccttttgtctgttactgaaacctagcatttgaagcagtagcttcagaggtgttggggtgggggtggggaatgggactgaatgccaccttgcttgcctctctactcccaagcctagcctattcctatgctggacagacgtccaacctgtctggtctcaacctgcctgcttccccgacccaggccctgggtccctgtttgtgcttccacagcacagactaagtccatcggcgatgttgcccgggtcctttctgtcccccatccttcccttcaacataagtgccttgagtatacaaggggagctactctggtccagctggtgccgatcccggtgccgggagagaaatctcttaggctgaaaggggcaaaagcctaagcgttttgtttgcttttgagaatctctggctggccttgaacgcagagagatctgcctgcttctgcctcctctgtactgggttttaaagcctgccgccccccatctcctcaacccacccccccatgcctggcccaagcttccttttttcattgccttgggattggggtgggaatagtgttccctgatgggggagacagagagtaaagagaaagaccctcgtggctctgttcttgttcaataatccctcttcctcagtgtttcctgaggttagatagagctgggtttgctggggattgatagtcccaatctctttctctccttctgtgtgtgtgtgtgtgtgtgtgtgtgtgtgtgtgtgtgtgtgtgtgtgtgtgttcgagtcctggatctcacagcagggagaaaggcaggcagagagctgctcccccctcttgttctctcgaaacatcttggttttccctcgaaagttggaaccagaagaggccctccttcccctccagccggccaggcttcctggcaacagagtttgtggtcagcagggttctgaggtctgatcctgccagaggaccagatgcactggtagctgggtgactccaggagagtgggcaagcacctcgtgtcagagtggccccaatagtggctggcaaggatcagacctggttgatatggcctagggccagcactgtgagccaacctaacactggctggtgtgggtcagtcagtgttcgctggtttgggctaggtcaggttgatgcctgctgtgagctcatagccgtgatgagtggccctgtcactccgtagcgtcctgcacgtctgctgaaacccggcacgcaccaactgtggtccagcagttcctctcctaggcacgcacccgatagaaatgtgcagatctgctcactgggagccctgccacagccatggtagcactcgctgtaccagccagaaccagcaactatccagaaacccttccacagaccagggtaaacaaactgcgggacattcacatttgggaagcctggggccttgtgggtgaactctgcagccacgtgctgtggcgtggtgtccgcctggccaaaggcctaggaaggaagtgagtccgtgtgcccacactgtaaaagccactgtcaccaacatgcttgggcacaaacaggtaagactttggctctgtcagggaggaagtagacctgctccttggtcttggcacaataaataaaataaaacatgtaatttcttatttttagaaggtctttttttttttttttaaatccaatattacagtggaaagtacttgcagtatagtgcaatctggctgcgaaacttgtggcaatccttatgtctcagtgcacacacaattgtcaacaatgggtaacttacacttttatctctcttacatgtatgtgatgggggcaggcacatgtaaacctgtcaagtcaacctctggttgcttctccttctccaccatctgagattccaggatgaaactcgggcgatcaggcttagccacaagcaccttcactgagctggaccatcgctagagctttttttggtttgtttcaggcagggtctcactaggctgtcctggaactcagtatgtagaccgggggtgggggggtgggctcaaactcacagagatcctcctggaggctgaaggtaaaagtgtgcccccataactccctttattttttgggacagggtctgttacatggccttggcagcatcctaccaccatgctcccccaacactccccttttaagacagggtctctctacacagtcctagctgtcctggaactcataaagcctgtgtccctctgctgccacacctgtccctcagtcctttgtttattgcagtttgagtcccaaaacgagtcccaaaactaggtagggtcttctgttccaggtgacctcttttcagtgtcctggtttggttaccgagtcagatacaccccatccttacgtggaaattagagacacagaacaccagacagtcccttgctgtacccttcagggaacaacaggtctcaaactagggggaactctccctaccaatccttccaagctttaacgggtgagctattcttaacaaagtctaacctgctagcctgggacgcaggtcattggatccctgacattccagttgggatctctgaaggtcagtgcttaccggagaagggcatggaagacaacttagatacaggcccagaactcaccccccacttgcctcctgtaccggacccatccactctccagttgcaaggaagtcctgttcaggccactaaccagtgcttcctgcatctcctactaggtctttaggttcctgccctaagtctaagcttaaaagcacacaggactttgtgttactcactgtgccctaagaacttggaagtcaaaaacgggttttcaacatcaccgctgcctcttgtctggtcttctttcattacagtcaggaggttcgatagaactccttaccgtccccccaccccccatcactcttaagcttaaatatcattgcagaaggagaggaatgggatacagggtgcgcaagccgaagagcacggaggtatctgcatgggggtcagtgggcggaactgtttgtttctggagtgggcaaggcaggagggagacaaactattgtgtttgcctacttctagagagggtcttgggtcgattacaaaaacacaagacacaaaaccggccggtgagcatatcaggacgaaaagaagcagaaaaatacgatcaagccagtttactagaagtgggccaagcaattggcgaagctttccgaaagcccatccaggaaggaagggtatccttttctggtacacacaggtcagaggcagtgtccgcccaggggccactactacgtcggaggaaaagggcccgcggggccattcccaaactctcccccttcaacaccacagcaagggcctagtggcctaggctgctggcaatgacctgtaccatgggaggatgtgggctggcgttggtgggagttggcagcttgctcagccacacctcgctacgaaggtccccagagctcgcagcaacttcgagcccctccagccaactcggctcgcggggcacaaagatggagggcgcggcgcgcttccatcccgccccgcccccacggcggttgcacacaaaggggcagccgctcctcccccagactgccccggcgccctaggctcccctccacccgttgggaacgcccctccatgacttcctccttctccaggggcacccctggaactgagggtcacctggaccttggtccgggacccgcggcctgccgtggcctcccgcgcctgaccgctgcgccccacccccaccgagcacgtgctgccctgcgcccagggcgccatcctacggcccgggggtggggggtgggtgggtagccgggcccgccgcgctcgccaccccccaccggaaacattcctgaggcattcctgaaagggaggcccgctccccaaggctcccaccccgcctccagccgggcgcacgctgggcccccgcgtacccttccaccgcccgcgcgccccccgaggagagggctgaccgcggaggaaggggaacagagttatgagtcacagtcgtgtgtcactgggcccgaattacgattccctgcatcacgagaggtgtggaaaggccgactcggggaaccgaggtggggaggtgcgtccaagggcccgcgcccggcctgcagggcgcgccccaccgcccgccatcttcccacttaggcttcctccggcccagcaacaagtcttttgttgacccaggcgcccagaggcgggaaactcgaacccctgccctcaaggggcttccaggcgccccttgtcttaagtcgtaagtcacgggggcggggaatcacaccagagggacctcgtgcttcctcaacaccaagcagctggccacccgtggctcctccccgcgatgtcccggcgaggcggccaatcgctcggctcctttgaagcctgcacctgggtggcggccgttactagatttaaaccgttggcgttggccaagtttcacgtttgggtttcacaagactttgttttttacgcgcctggaggcctccggagacgcacacgccgtcacctgcttggtggcagaggggaattaaggagaggccctcgacatgggctggggggggggcggcgtccgggccgcgagaagctccttagggtacgcgtggacgtccgagggcacaggcgtcagcgcgcgcctccccgcgaggccggagtccacgggggggctcctgtaggtgtgtccccgggtccccacttaaacagcagggccgccgtcaccggttcctccaacgccaggctgctcgggaactgtgagaaacgagggccgtcggcgcgcgtgcccgcggaaaccgcgcgcacagtggcgagctacccgcgcgcggcggcggcagctggcgggcggccgcccttttaaatccccgggctcatttgcatggccccgccccccggtgacacggctggcgcgggcgggcccgtcccccctgcccctgggtcgctctttttaagctcccctgagccggggctgcgctcctctaattgggactccgagtcggggctatttctggtgttggcgcggctccaagaaggcgtgagttcgccgccgctcgggtggcttctttttttcctgtaggtctagaatctaatcacattattatttattgaggccgcgcacgggccgtgcccagcttcctgcccctcgccatcctccaggggagcgggatccgtcagtgttccctcgccccagctcggatgtgacacacatccccggcgggggcccgggcggcgcgcacgcagcggtctcagcgcctctgccctctcccggtttcagatccgcatttgcgaccggcggcggtggcggcagagcccaggccggtgccctgagcccagccacgccgcacccggcagccccgagcgcgccccgccggcggcctgcggagctcgcggtgagtgtccgcggcgcgcccggggggcctgcggcgcgcgctgcccgctttattcccaggccccgggcttgcgcgggccgcgggaaaggggaggccgcactgtgctcgcaggcggcggggccggggtgggtgtccgcggggcgccgcgtcctccggtccccaggttgagggtgcccgggttgcgaccgtggggtgcggagaccccggggaacggcgcgcggagggggagggggcgcgcgactgcactagcgccgcttgtgcacccagcggcgcccgtgcacctcgcgctcggcgagcccggcctcagggaggggcgcgcgctgcgcagcggcgggaggtgggcgcgcgcccccctcagccagggaagttctagaagtgcgggggaggggcccggcgacccgagattcctctctggcctctcctccgcctttcccagagtagtactgtgcgtggacgaggccggatcgcgagggcctgggtttcggggtttcaccccccacccccacacacacctttggccctgccccgcgcctattcaacctccagggccaggcctgccctccgcccccacaaactggttcctctgctttgctgggttctgttagaactagtcccttcgactccccgtttctgctcccccccccccgctttggttttcatggagagaggaaggggtttttttcttcctgcgactcgcaccaggtttcctgcccccaaggcgggcttgggtgccccctctggcaggaagtggggccgggcgcacccgcgtggcggtgcatgtggtcggggtgcgccgtttcccgcgcctaaagggctctgcgcccctccccctcgtcctagctcctagaagcgccggcctacaaccaccaggctgggacgccagcgaaggcatcctcattctggagtagagggcgcctgggtcttaacctgcttctcagtaaacaaagtggcggtctgtgcattccgcaagaacctccattttaccaagttgctgtgtgaccttgggctattgaggggtcttctctctatatttaaagggggaccctttaagacccttaacaataggcctgccgggatgttactcctctggtagttcttgcatagttactgaaacgttgaggagccacagcgtgtgcacccgtgtgagagacaggctggaggcccaagagagacacatggggcttggactcctaaatgtgacttggccatgccagacctccctgatgctcagaaacaggtggaagaggtgaggttttccttggcctcgctggacagagactctaagcttaattcagtgggggcattggggagagcaggtggtttagagtccctaacggcaagaattggggaggcaccaggtggcaaaacagtgtccgggagactggccaggatctccaggcaagctagatgcatgcaaggtctttgggattggggcaggctttcccccaagagccccctctgaagggcctccagcagacctcggtgtgaggtcagtgctcattagctgattaattttgatgtttggtttgaaggacacctgtggtgtaatgtaaggttctaatcacagcctgtaattagagaacagaccaagccgctaatgatgggagctggcccagccaccctgtttaaaggagtctcgagtttgaaatctcgtaatagaataatgagcagagtccgcaccatctggggtctcttgatgcttgagaattaggaaaccgttaagtgttttagaaatcaaaagttttcaaaatgttttcctgtcgttgggtcaaaattatcccgttgcctcaaatctggaaagagggtgggggtggggcaacttgtttggtaagagcactgccccgcgtacaggatggacccttggttaactccagcctggtcctccactgtggcagtgaggtagctctgcaggtgccatggagcctgtaccttcacttctgccctcgctaaggacagcctgggctgctgcccaaagcttctcctggcctcttaagtacgggacacagggtcttgtggctgtcttccaataaacacaaacacacacaccacacgtgtggtgctggacctcagttaaaggacttcttgctacccagtcttttacttggaagggtctattgagaatctgcccttgccctaaggtagttgctagctatcaaagcacaactccagtttctcacgaagaccctcggctgctccctctgcacatggccaccctctatagatcttaaggatcttcatttactctgggtctcaggcttgagctgcggactgggactttcccttcttatttcaacccctaactaagggacaaggtagcgaatagcctcaacttgccccaggtcgctctgggactctctagccgggtgacacctcaaggtcaccacccttggggtgtgtgtggcaggggtagcgggtggagggaacacctgtgtaactgctattttgtctccgtgcatctcccccagactcactgtgtgctgccccacacatagagaaggagaatgagcgagtcgggctcaaagtccagccagcccctggcctccaaacaggaaaaggatgggactgagaagcgaggccggggcaggccacgcaagcagcctccggtgagtcctgggacggcgctggtcgggagtcaggtgggtgtctaaagctttgctcctgtttcctttcttgggctgggggggggcgggggtcagagctgactctttgcgcatgtgtatccctgtgtatgcttactgcccagaggtgtccagctcagtgtctaaggtcacagtgaaggcagccatgtcttaacattcacccagaaaagtgggagaatcagaaagaccagaccctatcttaaagaaaaatttttttttttttttttaatttttttgccctggtcagaacggagccaacaggcaggcttcgactggtggtacacggttttaaacaaataatcagactcttgttcagttgccttcggggctctacatctggtctttctgtttctgcacttccctaagtcaggtggctgtgtagatgtctgcttgcttacccacctacttaggccctggctctgtagtagacattgaggttctgggggtggggggtgtccctgaacgcctggcctgtctgtcttcacaatggagatgcccaccctctcccaagtgaggagaggctgttggtggccctgcgaaggtgacggagtctgtcctcagcaggttgtcttggctgggaaaatctgatgggtgatggaacttagccgatgtctccaggtggtggtcatgggaacaaggttcctgcagacctgtgcccttgccgtctggcctcctggttgtggagagggttttgggtttggatgaaagtttgcggtccaggctggcttcagacactgcgctcctggctcagcttgctgggtgcctggattgatcaggagtgggaagcaacgcattttactcaggccgcgagagggatttcctatgcaaagacagggggcggggggggggggacgctagcaatcatggcccgggccagaccactgctttatgcttgatttatctgacactgctagctaggtgttccccaccaggtgagatccgctacagggtggggccttttgcagaagaccagaaacataatattagtcaggtcagggcacctaactgtttcccttgcttgagtgacagttctccccagggatctctggtttctctttctttggtataaaacttttagattttagaggcttgaggacaggagcctgatgggggtgtcaggcaagtttggagtctccatggtgtgcctgctgcgtcttctgcagactctaggttggggtgacctaggggccagcacagctcggttggtactgtttccctgactcccagacatctttgcagaaagagcccagtgaagtgccaactccgaagagacctcggggccgaccaaagggaagcaagaataagggcgccgccaagacccgggtgagcctcctaggggacatcctgcatggatgccggggttagcttctcaggtctgggaaaaggcaaggtgggcagagagtaaaggcctgtgccagctctgagctgagaatgtcaccctcgttcatcccaaggacacgaagggtttgttcatgtggggagggcagagtcatggtggcatcagcctcaaaaatgttcttgtttttattttattttttaacacacgactcatatcctctgagtcacttgtgaaggggggagaaggggtgcgtgtatgttgggtggggggtgggggctggccagtcatcatcagctggacttgggtggacctgcttgtggggtcctgggctgtcctgagccagctccatctccgtctcgctgggctcgggtgtcccttgggttctgttcagcactttggacttaaccttatgttttaacccctggcccttcagaaagtcaccacagctccagggaggaaaccaaggggcagacccaagaaactggtaggtgctcgttgtgtttgctgggtgaaaggtgggttaaggatgccccagagtgggcatgttgaatgtctgagcatgcgtgaaacatgtcacataagttcagggttaccttcctcttcagagatcccttgtctccagaaaaataattcctgatatcaggtactcactatgggagaagccctatgggaccttattgggccctcaaagtgtcctgtgtccccaccccttattactgttactaggaccctcatggaaagatcaggaagtgaagctctggatagggaactgggtaccatgcagccttgtttctaagctgcccaagacaaggtcattcattcctgtgctgagccaccccttccttaagtggaggggctgggggcccctgctggcgtggccctaggagtgagtaacaggaaactagttgtttttggactgtgcctggcatggtgggggctgtggggccctgtggcgtcctaacattcccgcccagtgagggcgtccctggggctcgtccttccttcccatcctgggaagggtcagccactggacaccccaggccttcttagaaccagccctgcacctgctctgtaccgccccatggctctcccattcttgtctcttgcccttctgccccctctctggagagccacttcctcagcccttggtatagactctgggtctggcctggggggggggggggagggagagagagagagagagagagagagaaagagagagagtgtgtgtgtgtgtggtttgtttttttttccctccctttaaatccttagtttttatgaatgaaagcagcgtggaggttgctgagtcacccacacactcagccctgactcatcccccttttgcagaggaaagccggggagggaggaggggggagagaggggtgttggctgagaatgaaggccagtccttgagtcgctctgcctcccacaggagaaggaggaagaggagggcatctcccaggagtcctctgaggaggagcagtgatcaccactcgcagtgccgcctgctccatagccactgaggagcagctgtcccctgggactggaagccctgctcccaggcccctccccgcccccactgcacactaccgcaccaggcaccagctgcaggctctgctccgcagcacccaagggagcaggattcggctcagtccctgtgccctcctcccgaacacacctgccccatcctgacaaggctaacttcccatttagccgcagcccggcctgctgcgcacctccctcagagccgtggctctctgggcgctttgttttgcgggtcccttctgccctgctgttcctggcttccccgtagagggtcctgggagcattccctggccttaaggggccccggccccatctcactctgacaaggcccagtggctgacctagcagcagcagtgtggtcagggcaggggatgcttagatcccagcatgtccccaccaaagtatcaccgggtgggtttctcagcccctcctgccccaccctacagagatcatgcactgggttggctgagccccttgacaacaggaagtaggatgatgttggctccacccactttaatgttctcacctgagactagacagatggggttaccgcccatctccagagtaagggcctgttctcgcctccaccaaaggcaaacgggcaccaacacgcctcccccagtccactctaggctgttccttcctcccgcagggcactaaggagctagccttgccgccccctccttttcgctcctccctgccccccatggttctggttccatcttctcctctgttcacaaactacctctggacggttgtgttgttttttttttgttccatgttcattcttagatacccactattgctgctgctaccagcgtcagatgttcatcctcctgaatttgcctgtattctctcccccacacaatacactcgaggggaaggggggctggggcgcagcagactggttacctaccccacactaaggaagatggggccccaccccgtggatgctgcagcagagtgaggatgggggcccactttgatgggaaaagggtgtagggccacctccccttgttctgtgggggaggggtggccagtatttgtcccagcctggggcttcctccctggtttcttatttgcagttacttgaataaaaaacaaatagccttttctggacagtctctggtgtaaggagcattcacagtaaaaggggcggggccgactatgacccttccctgccccaccctgcaatggagtccacccaaggagggcaacttgaagccacaaaagtttttatttacaaaacatatacacctatacatctggacctgtcaccgtgggaataggctagtgtggaagagcggctgcctggaaggcttggctcggggccagctgtaggtggttagaatagacagatgctcctgtacctatctgggtgagtggtggagtgtggacggtcatgtcttgatgtccagcaggggcatccgcttgtgctggtagctgctctgccagccatgaaccacctgtcaggaagagcaagccactgcagcctcactgctggcaagtatttgtaaggatgacccatgacctggttgcttagagtgaggaactggcctcctgttgcaacgtggttcttagccagaaatgtagctcaccttggggtctcccacatcagagagcagctcctgctcagcttcctggagttcttctgcagggtcatagctatacatgggaagcagatgatggcgaagccggtccaccctgggagcgggagcacaggaacctcagccccgcactatccggtgtctcctcccctcaaaccactgggccagaaaggaacccatttctgctagggtaaagggtattagtaccagggagttagggcactcaccgctttttcttctgcacatacattacctgtaacagagacacgtactatggggctggggaggcaagcactgcccagtctcaagacccacttccacacccttaataacagccgagatgctgtggccaccaaaccaggcccacccagcagccaccccaggcaagtctgaggattccttaccacggccaccaccaccccgaccagggtgatgaggaagaaaggccccagcacatagcccaccatagagtcgctgttggcctggggggcattgggcactgtcgtgttactcatgacatcagtagccagatggctgaatggatggactgcatgggcagtggtggcctcgggagggcgcctcctctgggctccctggggaggaggaagggaggatatcagctgtacctgtggtgacaagcaggtctggaaatcccggaaaacttaaagccaaacactaatgaccccgaggtaaccagacaggcccagatcccatccaggcttggttccggcccagcgtcttacaaacaagagggtgtggcttagcttggatgcctggtagacatttgcaggtatcaactgcttggggaaggttaggtgcaggtgcacggctaaatggagagaaagaaatagctgggccttcactgcggtggaggggtgagttaggatcatgtgaaggggttctggttccgttcccccacggtatgaaggagccacaggcctgcatccttgtccctggtgtaatcctatccacggtcctcagcatcgctctcaggtacgagtgtggacattgtgtacagatggacagtatctaatctagatgaggtcacctgcctctagtacacccggggctccgcctatgtccctaccctctcggccagggctgacaggcagaggtggagagggtcgcccccatcgacagaaacgcgatcatcctcgggcggcagcactgagatggctcaagttcctgtcccagactctcagagagaggaagaggtactggctgactgcctcatgtccatgggtcagttttgccagttcccagttgcgagctccccgtctcaggccgaggggggcgaaccagaaccgaaaaggtatgaggccactcttaggatgctgctggcccgcctgggtgggcagatggttcccagctgcggggaggatcgggggtattggggaggggatatcgaggggccgatgcccgcctagataccttgggaccccggcaccccaagctgctccgtgcgggcgcgctgctgcccatccaacccggccatgccttacctcccgccgtgcagccctgacagcaacaccttgggttggccccggccccggaagagtcctccagcgcgtgatcaaaggagcgggagagaaggcggggccttggcgccccagtccagcatggtggccaatccggatgcgggtgggcgggccggacggggtcctgcagcgtccacgccgcggcagcagggggcgaccgagggccgcgcagcgggaaggttgcgggacggcgcgctttcccggctgcacacgggcgggcggggccagtggtcaccgcaggatcctggcgactggttgtccgcgggtagaggcggtggccgagggcctcactcctttctgtccccgcgtcttcaaagcaggttgccgtgaaactgaaatgatggtgtgggactggagcccagcacatccctgtggcccgaatgctaagctcattgaagcactttccccactgtgcgatgaggggaagcacagatggagcagcggggtcacttgcttgagtcaggggcagctcagtaagcctgtgtccaagctgtgatcgtctgattattaaagttacttagactggacaactctgagtaagaagatcacgtttgggggggagagatagatcagcggttaagagcacttaattactcttactgaggactcaggttaggttcccaacacccacgaggtggctcacaaccatttccagaggatgcaataccctcttctgtgccccgagaacactaggcaaagcaggtgataccggcaaagcacatatcaacacgggatgcaacaaaatttatttatttagtccgtgactaagtctcatggcgatcatccttgcaggcttggaactctctgtgcgtctgtgtgtgagcctcctggatgctaaaataggcatgtatcaccatgctgggggacagagccccctccctctttctcttgtatccctgacatcttgaattcctgattctcctaccttcaggtcacctcctaaatgctgggatcctgggcttcccaaatggtagccaagcgttctaccaacagcgctacctctttctccctcccaccctcccaccgtttctcctcctctcccctctctccctcctcctcacctccacccacctcttctttctactgccagagtgttgagattaaaggcccgtttgtcacaccagcaggacatataatcacagcatggaacctacacttactctgagtgggcattatagtttatgcatacatacctatagtcctgccccaggcctcttctccccctgcctaggttgaaagccatctaacattggtggtactgaagcaaagcctcctgagtcaatcagatggtaatcaggacaagggacagcctaggtgccctattcttgcacagaaaccccaaggggcagatgtgaggtaccctgagctagccccccttgctacttcctgcctgccatgtggttatgagtgagttcctctgtctggccctgcctggattgcctcagacctttctggagaaggataattgacagcaggtcaggtgcagaggtagacccaacagggaagcatggccgatgggaaccttgacaaacttcgtcctcagacagcaccacctgactgggggtaggatggggagagggaaagaatcaatgaaacccctcagcctggaggttgcaggggcatccgctgtcaccttcagcaaagagacgagacaccttaggctgtagaccttcaaggatgtccgagattttagaagtggggctccttcctccgttgtccagatccccagcttgtgtttgttgtcgggacttttgcagtttaacttttcttttctctagacttctctgcttccacctccggagttctatgacagctgtgcgctacaaggtatccagcatgtctggaaggctagttcatgtattcaaagggccagggtctcgggggcctggcctcaatcctagaacagaaactctgataaactaggaagggcagggagcagcctgaggccccaggcagtgtgacagccagcatcttgtgaaggacagggaacatggtgggtacggggtctcttcctggatgctctgggctggcagctgttccagagctgcatttatcattttacattcagattttttgggttttgtgttgtgtcttggttaaggtgtctattgccgtgatgaaacaccacaaccaaggagcgaattgggcaggaaagggttttcatagcattgtcatcagaggaagtcaagagaggaaccccaatggggcaggaagctggaggcaggagctgaggctgcggccatggaggggtgctgcttactggcttacccctcaccatggctttctcagcctgatttcgtagagaactcaggaccaccagcacagggatgacgccactcacagtgggctgagccctcccccatcaatcattaatgaagaaaatggccaaacggcttgcctacaacctgatcgtatggaggcatcttcatgacagagaccctctcctttcagatgactttagcttgtgtgaggttggcacaaaactaagcagcacagtgtgtgtgtgctgtgaaggatcggacccaggaccttaggcacactttgggtacctcctgtgggtgccctgccactgaaggacaccccaggcccactccttttgcttgcctccttacccagactgcatctgaggtcattgttgggactggagtggccatcctgaaggtcctttttgctctgagcccttccgcacaatacttgccaaataaaagaaaccaagaaggctgggctgtttccaagtgacacaacttcacaatatgctcagcaaggcaaaggtccaggaagccaaaggcagtcaggaccgggtgtcctttatatggacggacctaagggaccagcgctgcagctctgtgcaaggtacttgcttaggatgcgagaggtcctgtgttccactcccagcaatcctcaaaaaccactttaaaatcccagaggaacaggtatggtggcatacatatttagtccgcagctttcaggaggcagaggtgggcagagtttgagctagcctggtctatatagaattccagggcagcccggagaaagaccctgtatcaaataaataaacagaacgaaaaaacctggaggtactgtgaagaggcaggaaaagaaaccagctcaagcagaggcaggtggatttctgagtttgaggctaggctggtctacagagtgagttccaggtcagccagggctacacagagaaaccctgtctcgaaaaaaaaaaacaacaaaaaaaagcagaggaagaaggatcccgtctcagctcaacttctcacgcactatatgctgcctggttagtttttttttttttccttccttccttccttccttccttccttccttccttccttccttccttccaagattaggattgcatgtagctcaggctagcctcaggttcgttatgtagctaaaggtgggccgcctggctctgtccgaatgaactcctagcgtgtgcatccatggctggctgcccctcggtcctaccattggttgttttagagttggaggctctaatctccaatatcacaagcatattgtgagccccatgggaaacgggacagtccaggcaaagcgtcagcttcaggtcctcaaacccactctggggtaaagggtcagggggctcctgcacatgcgccacaacagtcactggccctggagtttgtggaagtgggcatggcctttgttctggatctgtttcttcttgtcagctcacccctgcggtccggaattctgcccgtgcccctgggcttgtggccatgttaccccagttcttccagcaaagcaagctgcgagtctgtcttgtgtcccggcgtctgaccctgctccgctcctctagcctcttactccataagtttcctcccttcttccatggctcccaaggtagcttgttttgcaccaaggtgctagaaaagcatgtgcactgcctctgtctctgtctgtctgtctgtctgtccatccgtccgtccatccgccagtccgactctctgtattgggatgcactgagtggatagagtgactgttgctggtcacaaattccatttactgtgtcttcaagatgccactcagctctgttttctcctgcgtgaatttccaaggaacccccagctatggtggcggggagcctctcctctctgaaagcacctcggaatgggggcatgtccaaggggacacagtccagtttagaggcaaagatctgagaggcttcccaaagtggggcactgaacatgtgaacaggaaacactgcggcagcgtctaatgcatttggggaactgcaacaagttccaggaacagtcggtcaccaaaggcagtcctgtggcacccaatatggtggccactgccatgtaaggtcccagctggccttcctgccaggccctctggcctcagtttaccattttcacagcactgcccaccatgttacaaaaccaacagtcactgtcactaagcacagcctgggccaaggtgcttcctcatcctcagaaatcctcagacgtttcctcctttgggaaggacccagctcacccctgagccttttctgttaacactgaagatcttccttgcataccctaggcaagttttctgccaacctacttgccctctctggactgaaacgatgcagaagagcctgcccgtgcctcctgagtgctgggagtaagggcattgtatattagttactataccgggcttaaatttcgtttttctgtgtccgtgtttatgtgtgtcggtctgccatagtggatgtgtggaggtcagaggaaagctcatagcaactggctctctctttccatatgtgggccctagggacaaaactcaggtcatcaggcctggtgacttatgcttattactggccaagccatctcaccagccctttgctgcttgttgtctatgtatttacttatctgtctgtctgtccgtccttatgtccacccacccacctatgtgttgaagacagtctaatgtagtcctggctacattcctggaactcctatgtagaccagactggcctcagagtcacagctgttcctgcctcctgagtgctggattaaaagtgtacatcaccaaggcccatatgcattttatttctgagacaaggtttcactcactaagttacccaggcaggtcttgaagtcactctgtagtctgggctacccttaaaccttcaattattgtgccttggcttgccgggccctgttggactccattgttgctgtgttgttgcttctgtctgtctgctgttactagtgagctgagcaccgtcctgcctagctatggcaaaactgccaccaagaacaacctaaagataggatggctgctttttcttgtgtgtgtgcacgctcatacacgcacccacatgagcctgttcaagtacttagctgtttaagccatagaggaaaagcaacagagagcaaatcagacaggtgccaggggaatctgcctgtccaaatgctgaaggaccttgtccccaactacttttggatccaccaataaaaatgtcagcagctgagccaggcgtggtggcacacacgcctttaatcccaacactcaggaggcagaggcaggtggatttctgagttcgaggccagcctggtctatagagtgagttccaggatagtcaggactatacagagaaaccctgtttccaaaaaccaaaaccaaaaccaaaccaaaccaaaacaaaacaaaaagatgtcagcagccaatggctgggcaaagggaaatggggcgggactcttagatctgtgaaggccaggaggcaggggaggagagtcgccaggacctgggagagtcggatcagatttagagctgcagagggaagatctctgaaatgtaggggaaaggggaagcccgcccagaagctagtgtctcggacagcatagaccaatgggcctcacggaaggtaacagagtagcgaagttaaaagtagattcagaaggtgttaagacaggggtaccagaaggaaaagtatgctagctgcaggaggattagaactgcccaacaaaaataagctcgtgtgtgtgtgtgtgtgtgtgtgtgtgtgtgtgtgtgtgtgtgtgtgtttcatttaaggatctaaagagctcaggggccgggtggctggaagcgccacccgccaggagcataaggctgagtaggcaaactccaggctacagagtcccacatttagcacactgctgatattcaggacaaagcgctgaggctcatggctgcagccccagatattctcctattggccatgacgagaaaacgaaccattcagaccccaagtctgcctgcaccagaaaggctgtggcttacaaccagctttttcccacacggtgaccagatctccagggatggcagtcaaaccggacaggggtgagcagaacgtccacaagggctggcaggaatgtggaacctgtccagcgtcaggagccaacctgctttcctcggggtgagccccccccatccctgtatgtctaagatataaatcctggtcagtctgcaggaagacaaccttacagttaccccaagaattacctcaaacactgatggtttagtcataaaatgtaggtcagaggaggtcttttttgttttttaagatttatttatgtgtgtacactgttgctgtcttcagacacaccagaagagggcatctgatcccattacacatggttgtgagccaccatgtgattgctgggaattgaactcagaaccactgacatctctccagccccaagagggagtctttttaacaccccagttacaactacaggacagttggctcgttcctcagattcgcatctgcaatccctgttaaggaagctgaggtaagaagattatgagttcaaggctgttccgtgtacataggatctggtcaccgggaggcaatggctctgtgagattcaggatccccagcctggtctacaaagtgagttccaggacaaccaggactacacagagaaaccctgtctcaaaaaaacaaaaacaaacaaacaaaaaaacagtatttgacacacgtctttcggggtctgttcttttcttcccagtggcttcctgagtggttcttaaattttttgtttgtttgtttattgtcaccctggaggggaggggctatcctctcatgtgtgtcacagtgtaggtgtcagagagcggttttatggacctttcagcatccaccttgtctttagttcttgggagcagccagccacctgcctttatccactgagtcacatgacccatccatcttctgatcccactgcgcttgccctccctgtcacccccacccccatcccctttgctgggttcttgaggtcaaagatggtcccatgaaagtctctcactttgccattcagggaactggaactggtcccacaggcactggggcagttagggcctgttttgtctcctctgatgaaggcactgacatgcatggggcagaccgccctgccttcactctgtgctaaggataggccagtcatacccacccagccgggacagggctcagcacagcttggacgtattgggggtggggcagcattcagtaagctctggccccctggccccaatatggaaaaaggtggcttccctgtttgccattgagatgtgggcttcactctgtaggccattctgacttcaggttcataggacagaccaccataccgagcttgaagaacagttttagtttaatgaaaaacgggggctgtcgagatggctcagtggctaagaacactgactgctcttccaaaggtcctgagttcaaatctcagcaaccacatggtggctcacaaccacctgtaatgagatctgacgccctcttctggtgtctgaagacagctacagtgtgcttatgtataataataaataaacatctaaaaaaaaaaaaacttttgggctggtgagatggctcagtgggtaagagcaccagactgctcttccgaaggtttggagttcaaatcccagcaaccacatggtggctcacaaccatctgtaacaagatct

SEQ ID NO: 163 - DNA, 1667 bp, Mus musculus
ccgggcggcgcgcacgcagcggtctcagcgcctctgccctctcccggtttcagatccgcatttgcgaccggcggcggtggcggcagagcccaggccggtgccctgagcccagccacgccgcacccggcagccccgagcgcgccccgccggcggcctgcggagctcgcgactcactgtgtgctgccccacacatagagaaggagaatgagcgagtcgggctcaaagtccagccagcccctggcctccaaacaggaaaaggatgggactgagaagcgaggccggggcaggccacgcaagcagcctccgaaagagcccagtgaagtgccaactccgaagagacctcggggccgaccaaagggaagcaagaataagggcgccgccaagacccggaaagtcaccacagctccagggaggaaaccaaggggcagacccaagaaactggagaaggaggaagaggagggcatctcccaggagtcctctgaggaggagcagtgatcaccactcgcagtgccgcctgctccatagccactgaggagcagctgtcccctgggactggaagccctgctcccaggcccctccccgcccccactgcacactaccgcaccaggcaccagctgcaggctctgctccgcagcacccaagggagcaggattcggctcagtccctgtgccctcctcccgaacacacctgccccatcctgacaaggctaacttcccatttagccgcagcccggcctgctgcgcacctccctcagagccgtggctctctgggcgctttgttttgcgggtcccttctgccctgctgttcctggcttccccgtagagggtcctgggagcattccctggccttaaggggccccggccccatctcactctgacaaggcccagtggctgacctagcagcagcagtgtggtcagggcaggggatgcttagatcccagcatgtccccaccaaagtatcaccgggtgggtttctcagcccctcctgccccaccctacagagatcatgcactgggttggctgagccccttgacaacaggaagtaggatgatgttggctccacccactttaatgttctcacctgagactagacagatggggttaccgcccatctccagagtaagggcctgttctcgcctccaccaaaggcaaacgggcaccaacacgcctcccccagtccactctaggctgttccttcctcccgcagggcactaaggagctagccttgccgccccctccttttcgctcctccctgccccccatggttctggttccatcttctcctctgttcacaaactacctctggacggttgtgttgttttttttttgttccatgttcattcttagatacccactattgctgctgctaccagcgtcagatgttcatcctcctgaatttgcctgtattctctcccccacacaatacactcgaggggaaggggggctggggcgcagcagactggttacctaccccacactaaggaagatggggccccaccccgtggatgctgcagcagagtgaggatgggggcccactttgatgggaaaagggtgtagggccacctccccttgttctgtgggggaggggtggccagtatttgtcccagcctggggcttcctccctggtttcttatttgcagttacttgaataaaaaacaaatagccttt

SEQ ID NO: 164 - protein, 132 aa, Mus musculus
GPVLASTKGKRAPTRLPQSTLGCSFLPQGTKELALPPPPFRSSLPPMVLVPSSPLFTNYLWTVVLFFFCSMFILRYPLLLLLPASDVHPPEFACILSPTQYTRGEGGLGRSRLVTYPTLRKMGPHPVDAAAE

SEQ ID NO: 165 - DNA, 29360 bp, Homo sapiens
agctccactgctcttccagggagtcccgggcagctgccagcagggaaggccctggagtttctctactcgctagcttaccagtctcccttacagatcccaccccagactgcaaggcatgcccagttcccagtagctgtatttcccgccatccagcagacctcagagggaaggcaggagttgggaggtgtcccagcctgggctggccaccagattcacgctgttcaccctctaggccactcaggtattctagagaccccctagtggctgggttcctagaaagtaagaaaataaagaggctccaacccaatttacagcgaggactaactgggtcttagagggtatatcgacccccgggatttatgggttggggaaagacctgaggactgggtgagcagggagcaggagaggaggttggcgtggaagagggagccagctgggccgctccccaccaccatctcctagccagattccagaccagcaggcttgcccagcttggcctgcctccctcctccgctctcccaccagtggctacctcccctcccccactctgctttcctcccctcccccagctacccacttcctctacccctcccccagcccttttcactctcattcaaccatccattcaccaaacttttgctgagcgccaagttccccttaggccctggtgcgaagcttgtgggtgtggagaagaacaaaacaaagccttggaggcttcccacaaatctccagcttggtgttggcccctttcccctagcccacctccaccccagcccagacccccacccctcgacctccacctggctctcagttccatctcctgactttggcccacagcttgtggggctgtatgtcccaccccaggtacccctgtgcttctggtttcaggcaggcagcgtaccctcctgccccttctaggacggagaccccaataccatactcagccctgagaaaggttcggggtgaggacgcagggtggcctggagtcctggtctcacatgactccctaatcaggacagtgtcccctagccgtgacacaccttcagtaaatggtgcagcctgtagaggcagaaggaaatgacccaaaactcatgcaaacccagacagcggtgggagggagcctgcccacagctaatgatggagaacagtcaggcttggaggctcagggcagccagacctggggtcactgttccccctccacagcccacaacacattcccacctggcttagaaagcaggaaagaggccaggtgtggtgactcacgcctgtaatcctagcactttgggaggctgaggtgggtggatcacttgaggtcaggagttcacgaccagcctggccaacatggcgaaattctgtctctgctaaaaatacagaaaaattagccaggcgtggtggtgcaaacttgtaatcccagctactcaggaggcggaaacataaaaattgcttgaacccctgccaggcgccgtggctcacgcctgtaattccagcactttgggaggccaaggtgggtggatcacgaggtcgggaattccagaccagcctggccaatatggtgaaaccctgtctctactaaaaatacaaaattagctgggcatggtggcacgcgcctgtaatcccagctgcttgggaggctaaggcagaagaatcggtcaaacccgggaggtggaggttgcagtcagccaagatcacaccactgcactccagcctgggtgacagagcaagactccgtctcaaaaaaaaaaaaagaattgcttgaacccaggtggcagaggttgccctgagccaagatcatgccactgcactccagcctggagcctgggtgacagagtgagactctgtctcaaaaacaaaaaagaggctgggctcgatgactcacacctgtaatcctagcactttgggaggccaaggtgggcagatcacgaggtcaggagttcgagaccagcctgaccaacatggtgaaaccacgtctctactaaaaatacaaaaattagccaggtgtggtgccgcaagcctgtaataccagctactcgggaggctgaggcaggagaatcgcttgaacctgggaggtggaggttgcagtgagctaagatcgcgccactgcactccagcctgggtgacagagtgagactccatttcaaaaaaaagaaaaaaaaaaaaagcaggcaagaaatagaaacaagagaaataagttaaagaccatatgagaatcccctgaaacttcagtcagtgcctgttccctagtgggtgtgacatgggtagcagcagtggctaaagttacaggacttgaccccccacttcctaatgctggctagtgagctgacatggacttccaatcctggtgtgtggcctgggaggcaaacccagcccaggcctcaagctggattccagaaaacacgccagcacctgggtaatggggtcacatgtgtgtgcagtagccatcctaacaggcttccttctactgactcacacgaatggggctttcacaggctacacagcttagcagtgcatgtgttttcagctggtcctgggtggaaaggggcatcgtgtttaggggcattttacctgcagatcctgttaacattggactgtggactgcacgttactcagaccaaagggaaacgattttgttccacaaaaagccaaaatcttgcactcatccagcccaactcacagtctggtgagctgccaccactgcctggtcaccaacaagcaaaccagccagtctgccccaaccaaagggacaaagtggttgttgtcagatggctgccagctcctgtgactaaacctgagatcaagtgaaaaaaacaatttcctgggccgggcgccgtggctcatgcctgtaatcccagcactttgggaggccaaggtgggcggatcacctgagatgaggagttcaagaccagcctgaccaacatggggaaaccttgtctctactaaaaatacaaaattagccaggcgtggtggcacatgcctgtaatcccagctacttgggaggctgaggcaggagaatcacttgaacctgggaggcagaggttggggtgagccaagatcgctccattgcactccggcctgggcgacaagagcaaaactccacctcaaaaaaaaaaaaaagcgcctatctctggaaggtgcaaaagccttcccacctgtctcaggcttggccaccctgccattcccatgatgattgctgggttccctgacctcttctttgccttgaggtttggggacagatgccctgtggcttggcctttgcggataacagaaaccactctggctaatcattcttcattcaacgcatttttttttttttagtttgaacactacgctaggccctagggataccccaaggaacacaaaagataaaattccgtaacctaatggagctggctttccagtggagggaactacacagaaaataccacacatatttatactcgatagcagttaaatagatgagtttatttatgtcagaaattgataagcgttacaagagaaaaagcatgatcaagtggatgagggattgtaagggaagatgtacaggttgtttgtttgagacagaatctagatctgtcccccaggctagagtgcagtgccctgatctcggctgactgcaacctccgcctcttgggttcaaatgattctcgtgcctcagcctcctaaatagctgggattacaggcatgtgccacaacggctggctaatttttttgtatttttaatagagacagggtttcatcatgttggcaaagcttatctcaaactctcaagtgatctgcccacctcagcctctcaaagtgctgggcctggctagagatgtacagttgtaaatagtgtagatgagtaacactgaacagagacctgaaggcagtgagagggcaagccctgaggacatcaggggaaaagcatgccaggcagagggcacagcaagtgcaaaggccctgtggcgggctcatgcctggcaggcctggggaacatcaagcagcccatgtggctgaagcagagagagcaacaggtaggagatgaggtcagagggcagactgcagggccttggaagcctctctttttactgtatgagatgagacaccctggaggaatctgagcagaggagaaacatgccttaggtttcatgtagagagattgaatgccaagaattaggtgcttacaaaaccattggaagaactggaggagccggctccatgctgggcccactggaacatgattgaactgccagcctggcctctgccctgatgaggagggtacagaatcaggaggccccacgggcatggttgagatctgatctagggtcaggaggccttgtgccactgcacctgcctcttgaacaccatgaagctagtgattagatgctggatgtcttgtagaaaacccgtatctccacagcccacacagcaatatttccctctgcacttcctcacagcaatatttccctctgtacttcctcccaccaaatttcactttattatttttattttttttgagacggagtttcgctcttgttgcccaagctggatagcaatggcacgatgttggctcaccacaacctttgcctcccgggttcaagcaattctcctgcctcagcctcccgagtagctgggattacgggcatgcaccaccatgcccagctaattttgtatttttagtagagacgaggtttctccatgttggtcaggctggtctcgaactcccgacctcaggtgatccagccgcctcggcctcccaaagtgctgggattacaggcttgagcgactgcgcccagccactttattattttgtttatgtttttgagacggagtcttactctgtcgcccaggctggagtgcggtagcatgatctcagctcactgtaacctctgcctccagggtttaagcagtcctcctgcctcagcctctcgagtaactgagatcacaggcatgcgccaccatgcctggctacgttttttgtaattttagtagagatgggtttcaccatgtggtcaggctggtctcaaactcctgacttcaaatgatcctcccgcctcggcctcccaaaatgctgggattacaggcatgagccactgtgcctggccccaaatttctttctttgatggaacccaattcatatccaaaacttgcttcaaaggaatgtagggcatggtgcataccaaatacctgcccaccgcatctctcacaggcccaagtccagccccatgccaaacaccctactgctcccacctgcctgcttcctaggcctcctgggatgctccacccacaccctgggcccctgccctgtgcttcctcaggctggcattacagcatgtaccacgctggtggaattgcctgtgtacttgtctatcccctcgtgcaccccactcaatgcaagccccttgaggacaggaatgtagctacccatttcaaggccacacccttggtggtggtacgtggagggatccatctggccaggctgggaggaggcagcaagcccatccagcctgggaatagaagcagtagagcggaaagaggcaaaatccttagctatttatatttaactgccccaagacttgtttggttatttttttgagagggagtctcactctgttgcccaggctggagtgcagtggcgccatcttggctcacggcaacctctacctcccaggttcaagtgattttcctgcctcagcctcccggctagctgggattacatgcacgcgtcaccaagctcggcttatttttgtatttttagtagagacggagtttccccatgttggtcaggctggtctcgaactcctgacctaaggtgatccgcccacctcagtctcccaaagtgctgggattacaggcttgagccaccacacccggccaagacctggttttaatacctgtgaaatggggcaacagtatcactcaccagtagggatgtggaggatctgagagaacatgtgcattcagtatatgcttatcaactccactctctccttagatttcttcaggggttggagaggagctgggcttccttggggatttagccctgaagaagtaagctgacaagtccatggcatcttggggccatgcaaggtgggtcattagctcacagtaggaaggcggagagggccctgattcctgggccctccttttcacttgagagtttttccctcgaaagttggaagcagcagaggccctcctccccttctaggcctgccagccttgctggcagcagaacttgtggtcagcagagcctggaagcctgatcctgccagatgaccagatgcactagtagctgggtgactcttgaggagagtggtcaaacattgtgtaccagggtagccccacctcctaccggcctgggtcagtcctggttgataggggccaggtcaggtttatgcctgttgtctggccataagtattaatagtgccgctttcactctgaagtgccctgctcgtctgctgaagctgagcatacacatcctgtgatccaataattcctctcctaggcacgtacgcaacagaaatttgcacatctactcacctatattctagaacattcatggcagcactattcataatagccccccgccagaaactatccaaatgtccttcaacagaatggatataaaattgtggtacattcatatcacatcactaagcagccctgagaatgaacattctgcagccacacacaatagcatggatgaacctcacagacataagggtaagcaaaggaaactaacccaggagaatacataatgtaagactccatatccctacgtgtgcacgaacaggtgaaacgaagcgctgcttaagttgagatggtggttacacaggggtactggagatgttgtatttcttggtctgcatgctggtgacacaaaggtgttcactttgtgaaaatgcatcaagctgaatacttaatagaactaaatggaaccatccacattagttttttcacctactcatctagaaaatgagcttaagagtcagcgtcccaaaatataaagttgactcaaactccccattccctggacattcccattgggttcactgaagctcactgggtcgtccttgagcaaactgtatagactgactccaataacagaaaatgcttcctgtggggaagacgggttctggtatcgaccaactcaaccccccgggccttgaccatgtccttggcctggaatagctccctcttcctgcttgccctgtccccaactcctcagccacccacctatccaagtctcacgaaggcctgctcaagcccgtctcctccaggacttccctgaccaccctgggctcccatcctctcctcctgtatttcctcctaagtctgtaagcgcctgaccccttggtccaagtttcaagagtgcaggggactttgttcattaattgtaccccaagaatttggcccagttcctgctacagagtaggttctcaataactactgaatgaaatgttttctaacatggcatctcctgtactgctattcagttttctctagtgcaggcctgattctgatttccctagacgtgaaattcgctgggacaaggactagatcctacccatctttttatctctaccactcgctcttctgcttaatacttatttaaaggggaaagaaaggaaagacagtgaattcagggcattgacaatccagaaagcgtggaggtgggggtcagtgagtagagagttatttggatttcaagggtgtgggtaatcctggagaggaacaagctactatatttatttgcctacgaatttatttatacctgcctccttccagaaagggtttgaggtggctgacaaaaatacacacaatacaaggtaaaaaacaagtcgctgaggaaatcaggccgagaggaaaataagagtaggaaaaataagatcgagtcggcttgctacaagtgggccaaaaagttggccaagttttccacagcccactcgaggcggaagtccctctcccctccccgtctcaggggcggccacacgtcccacacggacggggagagatgtacccgagagagagggcggacaggaccctctccgcacctccccagccgccaggccgccagcccggtgcccgggcctagcagcctccgcggccttggagagcgcgaagtggaggggcgcgcggctctggggggcagcccgagcccagacctgggtcccaaggtgctggcggggagcctgtgacctgggacggggtgctggaggctgaggaatcgcgcctccatgccacgccgcagaggttcccgcgctcgaaaccgaacgccctccagccaccaccactcacggcctactaagcgcgcgctccgggcccagggcacaaagatggagggagcggcgcgatccacccgccccacccccacccaccagacaaaggggcaggccgcccctcccccagccttcttcgcgggccccgccgccctctgctcccctcccctcgggccgccctttggtgacttcctttcccctccaagggcggccccgggacttctcaggaactgcgtttcacctggacgtggggcggggagccggcgcgcagagggcggcctccgggcccacccctaggccgagccggccccaggcccgcgccctcccctttgaacccgcgctcccggcccctggcgccttcccgcccaggcgcccccgcccccacccggtcaagcacgtgctgcccgggccccgagcgcttcccgccgcacgggtgggggctgggcccaccccccgcccgctccccacccccaccggaaacattcctgccacattcctgcaactgcaaggcccagcccgccgctccccaccccgcctccgcgccgggcccagggctttcctgcgtcccctccaccgccggctcgccccctgaggagggggctgggccagggcctcggctgaccggggaggaagaaggggagcagagaaaaacatgagtcacagccgtgtgtcactggagcgcatttcaattccctgcatcacaggaggtgtggaaggccgcctcggggaccgggcgcgcgaggtgcgcccgagaaggccccgggccggcctgcagggcgcgccgctccgctggccctttcctcccccaccgccctccccgccatcttcccctttggcttccttctcgctcggtgcaacaagtctttgttaagccgggcgccgggcgggccaggcgtggcggagatggcctgcgtgctcggcccctgccctcaaagcgcttccaggcgacctctggcccaccttttatttttatttacagtcccaacggaagggcccaggtccccaagtgggcctgcgtatctccagaacaccatctaagtcacctcaaggtatgaagcctcccttgggtgtacctgccaacgagccaatcgttggtttcgctggaaggctccaccttgatcatggctcgctggtggccattaataaaacactttggatttcacaagtttcacgtttgaatttcacaagacttgtatctcaccaatcagccacacgcgggttgacactgaaaggcacatgctgacacctgtccgcccaggggaaatctaccatctctctattttagttagggggcggcgtgtaggccgcggaattctctaacgagcgcgtttctcttcaccccctgggcccgcgtggacccccgtccacccccacacgccctggagggggggccgggcccacacgccctggaagcccctagaggtgactctccctgggacccctgtaccagggaggaaggataccgccacccgtcaccaccccccgccagaagctccttcgtgactcctctgcgcgtgccttcccacacctcctccgtccgggactgcgaggagtgggcggtcgactcgagttcgcagcccaggcctcccacacgcccctccctgccgtcagcacccacccgcgcggcagcggcggcggctggcgggcggccgcccttttaaatccccgggctcatttgcatggccccgccccctgagtgacacggctggcgcgggcgggcccgtcccccctgcccctgggtcgctctttttaagctcccctgagccggtgctgcgctcctctaattgggactccgagccggggctatttctggcgctggcgcggctccaagaaggcgtgagttcgcggccgctccggtggcttcttttttttatatctataatttaattaaattatttatttattgaggccgcgcacgggccgtgcccagcttcctgcccctcgccatccttcgggggagggggaatatttttgtccccccgcctggctgtgacacataaataccccgcgggggcctgggcggcgagcacgcggcggcggcggtctctgagcgcctctgctctctcccggtttcagatccgcatttgctaccagcggcggccgcggcggagccaggccggtcctcagcgcccagcaccgccgctcccggcaacccggagcgcgcaccgcagccggcgcgaagctcgcggtgagtcgtccccggggcccgcggcggcggcggcggaggggggcgcccgcgccccgcccgacgtcgcccctcctcgagccgcccggggctgcagcgcgcgccgccggctttattcccaggccggggcggcgcgaccggcggcgggggagggccgcgcggcgcgggggcgggcggcggggcccggcggcgcggggaggacgcccgcaccccttccccgcgccgcgggcgccctgcggggggcggggacccgggaaaggcgcgcggtgggggagggggcgcgcagctgcggcgagcgcgagttgtgcacccggcggagcccggaggagcccggcgcacctcgcgcggcggccgctcccgctggagccggagcccgagcccgagcccgagcccgggcccgggtgaggggcggggagagacacgggctgcggcgcggcaggagagtggggggtcgggcgccccccgcagctcagggaagttctggaagtgagggagatggggaggaacccccaaattcggccctacgccctctcggcctttctctcgcgccccctccgcagatgaggccggagcgcgggcctgggtttggggcttcaccccgaccccacctctggcctggcccgcgcctcttcagccccaggggccgggcctgccctccgcccccacaaactggtttcgctgctttgctgggctctgttggaactagtccctttgactccccgtttctattttattttcttctggggctttattttgcggggaggggacggagggagggggctttcttcctctcccccgcgcccgcgcgcgccaggtttcctgccccaaggcgggcttgggtgccccctctggcaggaagtggggccgggtgcacccgcgtggcggtgcatgcggtcggggtgcgctgctttcccgcgcctgcaggagcggcctgcgcccctccccccgcgcgccctggccccgggtcccgccggccggcctgcaacggccgggcgcagacacttgcagagtcaccctcgggccgggtctggagcctgatgcctcgggggtttagccctagccgctaggcgggtaggcaaagtgtcgggttgaaagggtctccgggaacctacttcttcctgctcgccaacttgctgtgtgaccttaggcaactcaaggcttctctgggctacttttttacgggggacggggaagaaaacaagggaacccccaagataatttcctagggcctttcctgcagagtccttaagtatttgaggagcacagtttgcatgcacagtgtatggaggagacaggcttgaggcccaagcgggcttattacaaagtgagggattggggttaggccctaaatgtagttcctccaagacaggcctctgatgttcagaaacaggtggaaaagacgaacgtttcttggcctcactggaaagggcctcgggccttcatttagttcgtggggggttggctgaggggattaaagggtccccagcagcaagaggtggggggaggcaccagatggtatgagagcttccagggagacccgccaagatctccaggcaggccgggccaggctctctgggattccggactggcttcgcccaactggaaccccctcgatgagggggccccaggcagaccttatatgaggtcagcactcgtttagttgattaattttgatgtttagtttgaagggggacctgtggtgtaatataagattctaatcactgcctgtaattgcagagcaggccaagccactaatgacggagcaggataaatcaccaaccaccttgtttaaaagggtctccaagtctgaaacattataagatagaataattaccaaagtcctgctgtctggagggtctcttgatgcttgaaaatggaggtcctgggccctctagaaatcacaagtttgcaaaaatgtttttttcctctcattggggtaaaaactctttttcttcttttttttttttcttttaaattagacatgggagtcccaccgtattgtccaggctggtctcgaactcctgacctcaagcagtcctcctgctttggcatcccaaagtgctgggattacaggcatgagtcacctcacctggcccataaatcattttcaaatggtctagttcttattttggttagagtgaagatttctttctattattttaagtttttctaaactattacctagtttgatccttgaagcagtcaggaggtagttcaggcaggtaccttataattaccttgatcttacagattgagaggggttcagaagtggagccgcttgtcccaccccttaccatggcaggcagggattggttactggaaaaatgtgtagcctaggcctccggcgtctcatccatctgtagcctggggataaggactaggataagaagatgtggaggactgtcctttttaagcctgtaatacagggtattcccaaatacaggttgcaggccctccttccaatgagaagttttaggaaaactcaaaattgatggggttaattaaaccccaacaggcctctaagaagaaggaagatgctagaaaatgaccaagaaggttttaggatgagccctaaacctcatcctaaaggatgagggccagccagggtctgttaggcggtgcatttcagttggagaattccctacccatctgacaaagtcccatctgactccagttgggcagaggaggggtaaggggaaagaggagggtggcctttggctttgggctcactttcctcccccacctcacccactagcttcaaccatctcctccctccctcaattataccaatctgaattctccagggatttaccctgggtgagaacagagaagagagctggtggtgggcaccacccctggctgtgtgattggctctttttggtcctgagtcttgcaccttgccagataggcaatattgtcagtgaggtgggcaggggatcaatgtccatagctgccagatcgcaaggtctcattctttccattttcccactgaactgcgtaggctggattttctcttaaagagaaagggcagcagttgactacagaaggaggggatgctggcaatacgtcagatctcacctccccacacctttgtcccagggtggcctcacccatgtagctaggtctgggctggctgtacctcctgggaccccccccaccacgctgcactggggcggtgttaaggcaggacaacaaagagcccttctgaacaggagatagataagaagctgattagggccaacggcccttccccgcccttggcagcatctgggggtgggcagacccctccatcctgggcagagtaggaggcctgggggcccatgggagcacagttttctgcagtgtgccttgaaggtgtgggtgatgagggggtagaaagtggctgaagcgagatgtttgtctaaaagcacttttctgtctcccagcatcccagccatcactcttccacctgctccttagagaagggaagatgagtgagtcgagctcgaagtccagccagcccttggcctccaagcaggaaaaggacggcactgagaagcggggccggggcaggccgcgcaagcagcctccggtgagtcccgggacagcgctggtagggagtcaggtgggtgtccaaacctttgcttcacttggtttaccctttggggctagggaggtgcctggagtttcattcagcaggcgagaccatgcatggagggtgcagaatgattctgcgcagtaagcgtgtgggtgtgtcctcccacctgtgtgtactcctgccccacttgcaaccctggtcagatctctatagagaccccaggagagaaccgggggccgaggaattcaagataaattctgaagccaatggcaaacagtccaaacctaaagcaccccagaggtcacatggccagtgcttaaaacactcgcctttttcttaatttccaatccactgtggaccagtaattttaaaatgcagtaaagacgaatgaacaaaaatgaacatagaagcccagggtttttaatcattagattcagtgcacgtaaaatgatttttgtcaatttgctgtaaagttgctgaatacttatggtcgattcttgtacttcctcatcccaggtgagaaacgggtgcctgcgtgggccagcacctgtttgtgcacaggccagttatgagtagttctggaatgggcattgcccctggctctttagatggaaattgaagcccaagaagtcaaaaatgttggggagttggtggcagtgaccctcagaaccctggtgctgctctccccacaaagtcctcatagaaggatgaggctgccagcctggcgctgtggggcaccctagggagcatggccatttgggcatgggggggaccccatattggcctcttacagaggcagctgtcacccaagtgaagggtggctgttggtgaagcccagttacttcccttccctgggagagaggtaagaggagttgagttcgacctctgccccttaaacatgatacaggttgttcacctgcaggttttccctgtccgtacggtggagagtggtctgtgctgacctgggcccagggagacacgagctgtgaggagtctgctgtgttggaattcagagcctggggtggggtcatttgtcctcttagcctagctccctcagcctcccctcctaccccacctgttagccatggtcagtgggaggtgtcaggaggggtgcagggttactggaccctggttatagacagaccatgggcggccccctaggaaacagtagctggcgcgccttcaccacacaccttatatgcattatgcagcagctttttattctatctacggcttattaaaatttcagtgggaatgatggcagggatctctggagtccggctataattccccttctctgggggcagcctggatgggctccaggtttgcaagtgcaggcagggagtgtgtgtccagcataggtcatctgagagggtgggcagtgatcatggcccagtgctagataaccatacattacccatttaatctccatgacaccctgcaagggaagtcttcaccatttatagatgaggaaactgaggctccagcattaagtgtcccacccaagataagtgtcagaactgagacttgggcagagccacctaactgtctttctgtccccagaatgcctttcctaggggtcttctgggctcttgtcattttgcatcttagaaacctgcagggaagcaaggggagaggtgggaggcactttgcaaagatgctcaaactggagctttggatcctgaagggattcctaggtcagggatggtttgtggttcttggttcttgctgacttaaccttgttgaggaggcagagggctgtgtcttctgagggggtggaaacaggtgatgactgtccctgactaccccctctgtctttacagaaggagcccagcgaagtgccaacacctaagagacctcggggccgaccaaagggaagcaaaaacaagggtgctgccaagacccgggtgagacttgagatgggactacccctgggtggatgactagcagaggatcctcttgttggcaccatggccacggctgtggggaggtctgggaaggggctcagtcatctcagttgtgtacccccttccctggtacagggatggcagtgagtctttgctaactggggagagtggggcgatgactaaggtcttacttctggggggttggtcctgcccaggacactgcggagatcaggtcagaagtcccacagctttcctgatctagagaagggcagagtggggagaatggagggtccctgccagtccctgggctgagaatgttaccttctcttggggttccctggagcctgaaggggtggggacaggcagcaaaggccagattcacagtgacattagcctttcagaaaagttgttttgttttttattttattttttctaagacacgactcatatcctctgagtcatgggcggaggtgggagtagggggcgtgtgtgtatgtcgagggggcaaatgtggctggccagtcattgccagctggacttgggtgggcctgttgggtgagagtgttgggtcaccctgaacaggcaggtaggtctgccccccatcactattgggcatcgggtgagcactgatgagcattttggacttaggagatattttctctaaccctctagaaaaccaccacaactccaggaaggaaaccaaggggcagacccaaaaaactggtaggtgaagaagcagactgctgcttgcctcctgggctcttttgagtgagggtgttgagtacacagtacctgatgctatgcaccccctatggaaaggctctccttgacctgctgggacatcagattttacagaagtccagagaggggaaggtacctggcctgggctgtgcccatgagaagtgaggggtcccaggtataaatcagaccacatccccctgccctgccctgccctagttgtgtgtgggggtccctccctctcctgctcctagaatactcagaacttctaggggagatcttggaagtcatctagcctgtgtccccctcaattagagatgaggaaaggaagccatagggggaaggtttgtccttcctatgagcctctgcagaagagaaacagcgaaggagctgggccctgggaggggtcggtgctggagttctgatgtgacccaccacactgcactggagggcaccatccaattctgggtccccaaacagctggtggaaaggctcggtgggctgagtcaagaagctgcctctagggggccactgcagttagggtcaccccagccttccagctcctggccctctcctacccccagcctgccccctcaaatccctgaagctgtcattccttgagctgagccactgctggggtgggggggttagggggtgctgctggccaggccccaagagtgagtaacaggaaacaagttgttttggagtttgtgcctggcacgggggctgtagccccgtgtggtgtcccgacattcccgcccagtgagtgagccccggcggcacacacttccccttcctccccaccccggcctagggtcagccctcggccaccccggagggccagggcaccacagcacagcatctgcccctgtgggccaaggacctggttcccctgcacccaccagcgggctcttgcaccttccagccaccccttcccatttcctcccccagccacctcttcccccacctcctcttctcccctagggagtcagtcacatcctgaagctcattgctgccctgagctctgccctcctgccctccctgggcctgggggccaagggggcttggctcctggctctgggtgagagcagcatgtgtgtggggttttttcctccttttaaattctttttatgaatgaagccgggccgtggaggttgctgagtcacccacacactcagccctgactcatccctcttcaggagagccagggagtgcagggagcgggtggggccagcctctgggggtggaagagggggaccgggccagagctcacaccaacaactgcccacctcacaggagaaggaggaagaggagggcatctcgcaggagtcctcggaggaggagcagtgacccatgcgtgccgcctgctcctcactggaggagcagcttccttctgggactggacagctttgctccgctcccaccgcccccgccccttccccaggcccaccatcaccaccgcctctggccgccacccccatcttccacctgtgccctcaccaccacactacacagcacaccagccgctgcagggctcccatgggctgagtggggagcagttttcccctggcctcagttcccagctccccccgcccacccacgcatacacacatgccctcctggacaaggctaacatcccacttagccgcaccctgcacctgctgcgtccccactcccttggtggtggggacattgctctctgggcttttggtttgggggcgccctctctgctccttcactgttccctctggcttcccatagtggggcctgggagggttcccctggccttaaaaggggcccaagccccatctcatcctggcacgccctactccactgccctggcagcagcaggtgtggccaatggaggggggtgctggcccccaggattcccccagccaaactgtctttgtcaccacgtggggctcacttttcatccttccccaacttccctagtccccgtactaggttggacagcccccttcggctacaggaaggcaggaggggtgagtcccctactccctcttcactgtggccacagcccccttgccctccgcctgggatctgagtacatattgtggtgatggagatgcagtcacttattgtccaggtgaggcccaagagccctgtggccgccacctgaggtgggctggggctgctcccctaaccctactttgcttccgccactcagccatttccccctcctcagatggggcaccaataacaaggagctcaccctgcccgctcccaacccccctcctgctcctccctgccccccaaggttctggttccatttttcctctgttcacaaactacctctggacagttgtgttgttttttgttcaatgttccattcttcgacatccgtcattgctgctgctaccagcgccaaatgttcatcctcattgcctcctgttctgcccacgatcccctcccccaagatactctttgtggggaagaggggctggggcatggcaggctgggtgaccgactaccccagtcccagggaaggtggggccctgcccctaggatgctgcagcagagtgagcaagggggcccgaatcgaccataaagggtgtaggggccacctcctccccctgttctgttggggaggggtagccatgatttgtcccagcctggggctccctctctggtttcctatttgcagttacttgaataaaaaaaatatccttttctggactggagtctcctgtggtgtgtgcccctaaagcctggggcaggtaggatgggtgacacttgtgttctggcccccatccttcaggctgcaggaagggaggggaaatagcactggaatcacctccggggaaggtcattttaagcctcttgatgaaatcaaaacccctagccacaaaacattttatttacaaaatatatactgaatactatacatctggccccatcaccatggaaacaactccaaagcctgcctggggatttgtgcccaagcccagcccaggagggctagagaaagcaaaggtgtctaccagccgccgccatcccagaaggaaagcctcttcccatgagtgcctgtgggtgggcggtgagctcaacacccacaaagggcagaaggcctgggggcagtgaggtgatggtgagggcatgggaagcagatgctgctgagggtgggtggagggagaaatggagacccagcacccagcagggggagccaggtgacagcaggggaagcagatggcagggccccaggcagtccaggaccccaggctctgaagggtggggcaagggggtcaggtcacgtcttgacatccagcagtggcatccgcttgtgctggtagccactctgccagccatgtaccacctgtcggggaggagaccacaccacaaggctgggctgtgttccctgggagtctgcagcacccagttacagcccaagtaagcagaaccaggctctggtttcagtgtggacgagtatggctgggaacagggctgactcccaccttgcctcattctccccctggcccccaagtgctcaccttggggtctcccatgtcagagagcagctcctgctcagcctcatgcagttcctcagctgggtcatagctgtacatggggagcaggtgatggcgcagccggtccaccctggggagcaggggaggggactcagctaggaggtccccccaaccctcatcaaacacctggctgcctcgtctctcctccctttcccaggcaggggcaattccagtgggtgccttttgggacacactatacctccaagaatacaaccctgattctacaaaggggctttccccagtgagtaacctgaggctggggcagggaaaacaaatttcaggcttgtatcaggatggctgagggacatcttacagaaaagtcagagcctatgagcaggaatttcagaacgggtgtggggttagggcgggtgggggacagggacactcaccgctttttcttctgtacatacattacctgcaacagagacacagcactgtgggggctgctgagcccaggaaggcccacaggcagagagaggcccacctccacacccttcactcccttaacaggacagtggggactctgtgcagactggaccaggcccacccagcccctgccttagcaaagctgtgggtgtctgtgtgtatatgagggctccttaccacagccaccaccaccccgaccagggtgatgaggaagaagggccccaacacatagcccaccatggagtcgctgttggcctggggggcattgggcacagtggtgttactcatgacatcagcagccggagggctgggtggtcagcatgggcagtggcgcttcgggagggcgcctccactgggctccctgggaaggaggaagggaggttatcagttgcacccaggtgacatccagactctggatccctcccccagagctgaagatctatgaaaactggtcccaggtcaaatcctgggaggagggatcctccaggtagatgtactgggtgtgaccctccagtgagtcttggcaaatcctggcaggaaaggggatcaagggaaggcctggatccagggctgagtcttgcccaactcctatccctaaatcagggtggggcccagctcagatgctggccaaacatttataagtctcagcttctggggaaagattaagtgcaggtttcaggtgcctgccccagcccttttggggcattgggctgccagcacctgtccagtggagcaaaatggataaatgaggtctaaaggaaggacctgcactgcagccaggggtgagatgggagcatctgaaggagcccgcttccatcctggtccaatcccacttcaagcgatgggctccatgcctgagttctatgcccttgtccctggtgtcacctcagacatacagcccaaacaccctctcccccatctgtctcgtgtgccagggtggacacgagtgggtaaagctggattgtatcttcaagatgatgtcaccttcctcttgtctccacccggggctccgcccaggtccctcccctcctggcctgagctgacaggcagaggtggagagggtcagtccccatcgacagaagcaaagagatcgtcctggggcagtttgcacgctgatggcccaaggtccgcgacccaggttcgcttgagtctctatcagagggcaaggtatgagcgacctacccccgtgtccgtagggcacggggcatcgagcttgcccttacccagtcgtatgctcatcgtcccaggtcaagggggcatgccagggtggggagggcgtcaggccgctgctaggatgcgggccagcaacagcggacaggaggtggttcccacggcgctgggaggctcaggccggaggtgggggtgttgggggatgcggatgggccgccccgcgcccgaacatcctggaagcccgtcacccgaggcgtggacccgtgccggcgctctgcagcccagccggcctggccatgccttacctcccgccgctgcagccccgacaggaacgccctcggttggctcccgggccccggaaaagccgtcaggcgcgtgatcaaaggacccggggaaatgggccgggcctcagcacccggacgcagccaatccggtagcggaaagccggtggcctggagatttctggagccgccaatccggaggcgggggtgggcggtgcgaaggcggggacagcggggcttgcagggtccgcccggcggcggcagggggcagccgagggctgcgtagtgggggaggagaacgcgacgcggggccggacggggtagggcggggcgcgcgcagttttccggcggcccctggcccgcccgcgtctggagctccgattctgggaggtccccggcgcccacttcattcacccctctcgttgcagccagaatagggtcgcgccacgatctaacgttgagcccaggcccttcgcggcaagaccctgctccgggcccactcggcctccgtctgtgtttgttccctggccttcgggctgtgctcggctggtagagtacggcaggtctgggctaccgagggccctggcacgcccaccctctctgcgcctgtcttaacgtctgtaaaacaagctgtgtgaggattattattattactttttttttgagatggagtctgtctctgtcgtccaggctggagtgcagtggcacgatctcagctcactgcaatctctgcctccctggttcaagctattctcttgcctcagcctcccgagtagctgggactacaggtgtgcaccaccatgcctggctaatttttgtatttttagtagagagggggtttcaacatgttcgccaggatggtctcttaacacctgacctcaggtgatccacctgcctcagcctcctaaagtgctgggattacaggcgtgagccactgggcctggccggattttactttcttttctcctaagagagaacacccttgtgagctaggcagggcaagtggagcaatcgcaatttgcagatgagttaattgatgctcaagcaatgagatgacttctcagggcccttggcctgatcattaagggcagggtgggatgagatgacaggtgggcctctcttcttggacagctctctgctgacagctgccccagagctacatttgaggcctggtgtcttgctgtgttcaggcttcatatctgatgagagtacctccaagtatagccgggaaaactgcagctctgccttccctcttcatgcagctaccgtttcaggaagcgggaggctagggtggggttgaggctacattgtgctaccatgctcgagttttgactgcctcctgatccatgctgctgtggttagtgcctggacttgtctgcccacttcagctaatgcctcactcatcctcgtgtcctccagctctggatccactgaacaaaccataaaagcaagacctgaaaggattgaactattttcagttaacttttagaatgaagctcaagaagatttataggaaggcaaaaatatccagtttttataatatctgacatccactaaaaaatggaacctggtggccaggtgcggtggctcatgcctgtaatcctagcactttgggaggccgaggtggtggatcacctgatgtcaggagttcgagaccagcctggccaaagaggtgaaaccccatctctactaaaaatacaaaaattagctgggcgtggtggcaggagcttgtaattccagctactcaggagactgaggcaggagaatcacttgaacccaggaggcagaggttgcagtgagccgagatcatgccattgcactccagtctggtgacaagagtgaaactctgtctcaaaaattaaaaaaaaaggaccctggctgggtgctgtggctcacacttgtaatcccagcacttaagacaaggaatgtatgaaaatatcccagtgatcttctagagatgaaaactacaatatcagattaaaaaaatcatactggacaggattaatcacactggacaggattaatggcaggttagatattacagaagaaaagacaagtgaacttgagggcatagcaatagaaactacccaaaataaaacccaaagataaaaaaatccaaaaaaaaaaaaaaagaaaaatgaaaaaaggatcagtgagttgcgggataaccgtaagtggcctaatatatggataattagaggtccaaaaggagaagaaagaaaggacagaaaaatatttgaagaaaccatgaccaaaagctttccaaacttgggccaggcgcagtggctcactcctgtaatcccagcactttgggaggccgaggcaggtgtatcacctgaggtcaggagtttgagaccagccggccaacatgaagaaaccccatctctactaaaaatacaaaaatttgccaggcgtgttggcacatgcctgtaatcccagctacttgggaggctgaggtaggaggatcgcttgaacccgggaggcagaggttgcagtgagctgagactgtgccattgtactccagcctgggcaacaagagcaaaactcccgtctcaaaaaacaaaacaacaacaacaaaaaactttccaaacttaaagatggctataaacctacagacccaggaagcacaataagcccaagcacaagcaacatgaagaaactgtgccaaagcacatcgtaatcaaattgctcaaagccagtggtaaagatgttacacacagaggaacaaagttaagaatggcataaaatttcacttgaaacaatccaggtgaaaagatggtggagcaacatcttttatttttttatttatttttattttattttattttttttttttgagacagagtctcgctctgtcgcccaggctggagtgcagtggtgcaatctcagctcactgcaagctccgcctccagggttcccgccattctcctgcctcaggctcccgagtagctgggactacaggcacccactaccacgccctgctaattttttgtatttttagtagagacagggtttcaccgtgttagccaggatggtctcgatcctctgatctcgtgatacgcccgcctcggccttgaaaagtgctgggattacaggcgtaggcaactccgcgcctggctaacatcttttaactacttaaagaaaaaactctcgatctagaatattggggaaaaaaaatctgtcaaaaacaagaaataaagatgttttcaggccaggcgtggtgactcacgcctgtaattccagcactttgggaagccgaggcgggtggatcacttgagcccaggagtttgagaccagcctgggcagcatggtcaaagcctgtctctaccagaaatacaaacattagccagtctcataacctggtctcaaaataaataaatagataaaaattaaaacataaaattaaaaaatttttgaaaacgatgttttcagacatacaaaactgaaaggaatcatcaccagtagacctgcactacaagaactgttaaaggaaattcttcaggcagaaaggtaattgtaccaaataaaaatatgatcccacaagagaaagaaagagcatccaaatcggtaaagaggaagtcatactgtcactgtttgccgatgatatgatctttgacaaagcaaacaaaaacataaagtggggaaagcacaccctattcaacaaatggtgctgggataattggcaagccacatgtaggagaatgaaactggatcctcatctctcaccttatacaaaaatcaactcaagatggatcaaagatgtaaatctaagacctaaaaccataaaaattctagaagataacatcagaaaatcccctctagacattggcttaggcaaagacttcatgaccaagaacccaaaagcagattcaacaaaagcaaagataaatagatgggattaattaaactaaatagcttctgcacagcaaaagaaataatcagcaaacagacaacccacagaatgggagaaaatcttcacaatctatacatctaacaaaggactaatatccagattctacaaggaactgaaacaaatcagcgagaaaaaaccaaacaatctcatcaaaaagtaggctaaggaatgaatagacaattctcaagaaaaagatatgcaagtggccaacaaacatgaaaaaatgctcaacatcactaatgatcagggaaatgcaaatcaaaaccacaatgtgataccaccttactcctgcaagatggccataattttaaaaatcaaaaagtaggctgggcatggtggctcatgtctgtaatcccagcactttgggaggccaaggcgagcagatcatgaggtcaggagatcgaaaccaccctggctaacccaatgaaaccccgtctctactaaaaatacaaaaaattagccgggtgtggtggcatgcccctgtaatcccagctacttgggaggctgaggcaggagaatcacttgaacctgggaggtggaggttgcagtgaactgagatcgtgccactgcactccagcctgggcgacagagtgagactgactctgcctcaaaaaaaaaaaaaaaaaaaaagaaagaaacacaatagatattggcatggatgtggtgaaaagggaacacttttacgctgctggtgggaatgtaaactagtacgaccactgtggaaaacagtgtggatattccttaaataactaaaagtagatctaccatttgattgagcaatcccactactgggtatctacccagagtaaaagaagtcattatatgaaaaaaagacacttgcagctgggctcagtggctcagcactttgtagtcccagcactttgggaggccgaggtggacggatcacctaaggtcgggagtttgagaccagcctggccaacatggtgaaaccccgtctctactaaaactacaaaaattagctgggcgtgatggcacacacctgtagtcccagctactttggaggctgaggcacgagaatcgcttgaacccaagaggtggaggttgcaatgagccgagatcacgccactgcactccactccagcctgggcaaaagaataagacagagcgagaacttgtctcaacaaaaaaaagaaaaagaaagaagacacttgcacacacatgtttatagcagcacaattcggaattgccaaaatatggaaccagcccaaatgcccatcaatgaatgagtgaataaagaaaatgtgatatatatacataccatggaatactattttatatatatatatatatatatatatatatatatatatatatatatatatatatacacacaccatggaatactactcagccataaaaaggaatgaaataataggatttgcagcaacctggatggagttggagaccattattctaagtgaagtaactcagaaatggaaaaccaaacaccatatgttctcacttgtaagtaggagctaagccatgaggatgcaaaggcataagaatgatacagtggacttggaggacttgggggaaaggatgggaggggggtgagggataaaagactacacatcgggtacagtgtacacgactcaggggatgggtgcaccagaatctcagaaatcactactaaagaacttaccaaacaccacctgttccccaaaaacctactgaaaaaaaaaattcaaaaaaaatatggacctatccaaaggaatgaagaatactgaaaatggtagctatgtgagtatgtatatatgtaaatatatatatatgtgtcagtatgtatatatgtacaaacatatatgcacatatattccacacacatatacacatatattccctccaccaccaccatttttctttgtttgcttttatttatttatttttttgagacagagtttcactcttgttgcccaggctggagtgcaatggcgcgatctcggctcactgcaacctccgcctcccaggttcaagcgattctcctgcctcagcctcctgagtaactaggattacaggcacccaccaccacgcccggctaatttttgtatttttcgtggagatggggtttcaccttggccaggctagtctcaaactcctgacctcaggtgacccacccgcctcagccacgcaaagtgctgggattacaggcatgagccaccatgcctggcctgtttgtttttagagaccagttccccctatgttgcctaggctggtctagaactccttggttcaagcaatcctcatgcctcagcctcccaagtagctgggattacaggagcatgtcactgtgcccggcttgccccatctgttagttaaatctttttaaagaggtaattgaggccaggtacgttggctcacacctgtaatcccaacactttgggaggccaaggcaggccaatcacctgaggtaaggaatttgagaccagcctggctaacatggcgaaaccccgtctttactaaaaatagccgggtgtggtggcacgcacctgtagtcccagctactcggggagactgaggcaggagaatcgcttgaacccaggagacgaaggttaaagtgagccgagatcgtaccactgcattccaccctggaagacagagcaagactccatctcaaaaaaagaaaaaaaaaagtaatcgattgtaaaaaacaaaacaaaaagcccaatactgtattgtgggacttttgcacatggaacatttatcaagacagaccatattctgagccataaaacaagtctcagccaggcgtggtggctcacgcctgtaatcccagcactttgggaggccaaggcgggtggatcacctgatgtcaggagttccagactagcctggccaacatggtgaaacctcgtctctactaaaaatgcaaaaattagccaggtgtggtggcacatgcatgtgattccagctacttgggagctgaggcaggagaatcacttgaacccgggaggcggaggttgcagtgagaagagatcatgccactgcactacagcctgggtgacaagagtgaaactctgtctcaaacaaaacaaaacaaaaaacaagtctcgataaatataaaggattcaatttaatgtattactttaatagcataaaggttgggaaagaaatgggaatatactactgtattcatatatatatgaggttgtataatatcacttaatgatagactgtggtgagttaatgatgtatagtatgaaccctaaagtaactaataaagtaacagagttatagataccaacaaagaaaataaagtggatataaaataagaaatctaaaaaaaaaaaaaagcagaaaaagaggaacaggggaaccaagaacagataagataattagaaaac

SEQ ID NO: 166 - DNA, 764 bp, Homo sapiens
tctttttaagctcccctgagccggtgctgcgctcctctaattgggactccgagccggggctatttctggcgctggcgcggctccaagaaggccatcccagccatcactcttccacctgctccttagagaagggaagatgagtgagtcgagctcgaagtccagccagcccttggcctccaagcaggaaaaggacggcactgagaagcggggccggggcaggccgcgcaagcagcctccggtgagtcccgggacagcgctggtagggagtcagaaggagcccagcgaagtgccaacacctaagagacctcggggccgaccaaagggaagcaaaaacaagggtgctgccaagacccggaaaaccaccacaactccaggaaggaaaccaaggggcagacccaaaaaactggtaggtgaagaagcagactgctgcttgcctcctgggctcttttgagtgagggtgttgagtacacagtacctgatgctatgcaccccctatggaaaggctctccttgacctgctgggacatcagattttacagaagtccagagaggggaaggtacctggcctgggctgtgcccatgagaagtgaggggtcccaggtataaatcagaccacatccccctgccctgccctgccctagttgtgtgtgggggtccctccctctcctgctcctagaatactcagaacttctaggggagatcttggaagtcatctagcctgtgtccccctcaattagagatgaggaaaggaagccatagggggaa

SEQ ID NO: 167 - protein, 104 aa, Homo sapiens
MSESSSKSSQPLASKQEKDGTEKRGRGRPRKQPPVSPGTALVGSQKEPSEVPTPKRPRGRPKGSKNKGAAKTRKTTTTPGRKPRGRPKKLVGEEADCCLPPGLF

SEQ ID NO: 168 - DNA, 1739 bp, Homo sapiens
tctttttaagctcccctgagccggtgctgcgctcctctaattgggactccgagccggggctatttctggcgctggcgcggctccaagaaggccatcccagccatcactcttccacctgctccttagagaagggaagatgagtgagtcgagctcgaagtccagccagcccttggcctccaagcaggaaaaggacggcactgagaagcggggccggggcaggccgcgcaagcagcctccggtgagtcccgggacagcgctggtagggagtcagaaggagcccagcgaagtgccaacacctaagagacctcggggccgaccaaagggaagcaaaaacaagggagaaggaggaagaggagggcatctcgcaggagtcctcggaggaggagcagtgacccatgcgtgccgcctgctcctcactggaggagcagcttccttctgggactggacagctttgctccgctcccaccgcccccgccccttccccaggcccaccatcaccaccgcctctggccgccacccccatcttccacctgtgccctcaccaccacactacacagcacaccagccgctgcagggctcccatgggctgagtggggagcagttttcccctggcctcagttcccagctccccccgcccacccacgcatacacacatgccctcctggacaaggctaacatcccacttagccgcaccctgcacctgctgcgtccccactcccttggtggtggggacattgctctctgggcttttggtttgggggcgccctctctgctccttcactgttccctctggcttcccatagtggggcctgggagggttcccctggccttaaaaggggcccaagccccatctcatcctggcacgccctactccactgccctggcagcagcaggtgtggccaatggaggggggtgctggcccccaggattcccccagccaaactgtctttgtcaccacgtggggctcacttttcatccttccccaacttccctagtccccgtactaggttggacagcccccttcggctacaggaaggcaggaggggtgagtcccctactccctcttcactgtggccacagcccccttgccctccgcctgggatctgagtacatattgtggtgatggagatgcagtcacttattgtccaggtgaggcccaagagccctgtggccgccacctgaggtgggctggggctgctcccctaaccctactttgcttccgccactcagccatttccccctcctcagatggggcaccaataacaaggagctcaccctgcccgctcccaacccccctcctgctcctccctgccccccaaggttctggttccatttttcctctgttcacaaactacctctggacagttgtgttgttttttgttcaatgttccattcttcgacatccgtcattgctgctgctaccagcgccaaatgttcatcctcattgcctcctgttctgcccacgatcccctcccccaagatactctttgtggggaagaggggctggggcatggcaggctgggtgaccgactaccccagtcccagggaaggtggggccctgcccctaggatgctgcagcagagtgagcaagggggcccgaatcgaccataaagggtgtaggggccacctcctccccctgttctgttggggaggggtagccatgatttgtcccagcctggggctccctctctggtttcctatttgcagttacttgaataaaaaaaatatccttttctgga

SEQ ID NO: 169 - protein, 326 aa, Homo sapiens
MSESSSKSSQPLASKQEKDGTEKRGRGRPRKQPPVSPGTALVGSQKEPSEVPTPKRPRGRPKGSKNKGEGGRGGHLAGVLGGGAVTHACRLLLTGGAASFWDWTALLRSHRPRPFPRPTITTASGRHPHLPPVPSPPHYTAHQPLQGSHGLSGEQFSPGLSSQLPPPTHAYTHALLDKANIPLSRTLHLLRPHSLGGGDIALWAFGLGAPSLLLHCSLWLPIVGPGRVPLALKGAQAPSHPGTPYSTAAAGVANGGGCWPPGFPQPNCLCHHVGLTFHPSPTSLVPVLGWTAPFGYRKAGGVSPLLPLHCGHSPLALRLGSEYILW

SEQ ID NO: 170 - DNA, 1886 bp, Homo sapiens
tctttttaagctcccctgagccggtgctgcgctcctctaattgggactccgagccggggctatttctggcgctggcgcggctccaagaaggcatccgcatttgctaccagcggcggccgcggcggagccaggccggtcctcagcgcccagcaccgccgctcccggcaacccggagcgcgcaccgcagccggcgcgaagctcgcgcatcccagccatcactcttccacctgctccttagagaagggaagatgagtgagtcgagctcgaagtccagccagcccttggcctccaagcaggaaaaggacggcactgagaagcggggccggggcaggccgcgcaagcagcctccgaaggagcccagcgaagtgccaacacctaagagacctcggggccgaccaaagggaagcaaaaacaagggtgctgccaagacccggaaaaccaccacaactccaggaaggaaaccaaggggcagacccaaaaaactggagaaggaggaagaggagggcatctcgcaggagtcctcggaggaggagcagtgacccatgcgtgccgcctgctcctcactggaggagcagcttccttctgggactggacagctttgctccgctcccaccgcccccgccccttccccaggcccaccatcaccaccgcctctggccgccacccccatcttccacctgtgccctcaccaccacactacacagcacaccagccgctgcagggctcccatgggctgagtggggagcagttttcccctggcctcagttcccagctccccccgcccacccacgcatacacacatgccctcctggacaaggctaacatcccacttagccgcaccctgcacctgctgcgtccccactcccttggtggtggggacattgctctctgggcttttggtttgggggcgccctctctgctccttcactgttccctctggcttcccatagtggggcctgggagggttcccctggccttaaaaggggcccaagccccatctcatcctggcacgccctactccactgccctggcagcagcaggtgtggccaatggaggggggtgctggcccccaggattcccccagccaaactgtctttgtcaccacgtggggctcacttttcatccttccccaacttccctagtccccgtactaggttggacagcccccttcggctacaggaaggcaggaggggtgagtcccctactccctcttcactgtggccacagcccccttgccctccgcctgggatctgagtacatattgtggtgatggagatgcagtcacttattgtccaggtgaggcccaagagccctgtggccgccacctgaggtgggctggggctgctcccctaaccctactttgcttccgccactcagccatttccccctcctcagatggggcaccaataacaaggagctcaccctgcccgctcccaacccccctcctgctcctccctgccccccaaggttctggttccatttttcctctgttcacaaactacctctggacagttgtgttgttttttgttcaatgttccattcttcgacatccgtcattgctgctgctaccagcgccaaatgttcatcctcattgcctcctgttctgcccacgatcccctcccccaagatactctttgtggggaagaggggctggggcatggcaggctgggtgaccgactaccccagtcccagggaaggtggggccctgcccctaggatgctgcagcagagtgagcaagggggcccgaatcgaccataaagggtgtaggggccacctcctccccctgttctgttggggaggggtagccatgatttgtcccagcctggggctccctctctggtttcctatttgcagttacttgaataaaaaaaatatccttttctgga

SEQ ID NO: 171 - protein, 96 aa, Homo sapiens
MSESSSKSSQPLASKQEKDGTEKRGRGRPRKQPPKEPSEVPTPKRPRGRPKGSKNKGAAKTRKTTTTPGRKPRGRPKKLEKEEEEGISQESSEEEQ

SEQ ID NO: 172 - DNA, 1919 bp, Homo sapiens
tctttttaagctcccctgagccggtgctgcgctcctctaattgggactccgagccggggctatttctggcgctggcgcggctccaagaaggcatccgcatttgctaccagcggcggccgcggcggagccaggccggtcctcagcgcccagcaccgccgctcccggcaacccggagcgcgcaccgcagccggcgcgaagctcgcgcatcccagccatcactcttccacctgctccttagagaagggaagatgagtgagtcgagctcgaagtccagccagcccttggcctccaagcaggaaaaggacggcactgagaagcggggccggggcaggccgcgcaagcagcctccggtgagtcccgggacagcgctggtagggagtcagaaggagcccagcgaagtgccaacacctaagagacctcggggccgaccaaagggaagcaaaaacaagggtgctgccaagacccggaaaaccaccacaactccaggaaggaaaccaaggggcagacccaaaaaactggagaaggaggaagaggagggcatctcgcaggagtcctcggaggaggagcagtgacccatgcgtgccgcctgctcctcactggaggagcagcttccttctgggactggacagctttgctccgctcccaccgcccccgccccttccccaggcccaccatcaccaccgcctctggccgccacccccatcttccacctgtgccctcaccaccacactacacagcacaccagccgctgcagggctcccatgggctgagtggggagcagttttcccctggcctcagttcccagctccccccgcccacccacgcatacacacatgccctcctggacaaggctaacatcccacttagccgcaccctgcacctgctgcgtccccactcccttggtggtggggacattgctctctgggcttttggtttgggggcgccctctctgctccttcactgttccctctggcttcccatagtggggcctgggagggttcccctggccttaaaaggggcccaagccccatctcatcctggcacgccctactccactgccctggcagcagcaggtgtggccaatggaggggggtgctggcccccaggattcccccagccaaactgtctttgtcaccacgtggggctcacttttcatccttccccaacttccctagtccccgtactaggttggacagcccccttcggctacaggaaggcaggaggggtgagtcccctactccctcttcactgtggccacagcccccttgccctccgcctgggatctgagtacatattgtggtgatggagatgcagtcacttattgtccaggtgaggcccaagagccctgtggccgccacctgaggtgggctggggctgctcccctaaccctactttgcttccgccactcagccatttccccctcctcagatggggcaccaataacaaggagctcaccctgcccgctcccaacccccctcctgctcctccctgccccccaaggttctggttccatttttcctctgttcacaaactacctctggacagttgtgttgttttttgttcaatgttccattcttcgacatccgtcattgctgctgctaccagcgccaaatgttcatcctcattgcctcctgttctgcccacgatcccctcccccaagatactctttgtggggaagaggggctggggcatggcaggctgggtgaccgactaccccagtcccagggaaggtggggccctgcccctaggatgctgcagcagagtgagcaagggggcccgaatcgaccataaagggtgtaggggccacctcctccccctgttctgttggggaggggtagccatgatttgtcccagcctggggctccctctctggtttcctatttgcagttacttgaataaaaaaaatatccttttctgga

SEQ ID NO: 173 - protein, 107 aa, Homo sapiens
MSESSSKSSQPLASKQEKDGTEKRGRGRPRKQPPVSPGTALVGSQKEPSEVPTPKRPRGRPKGSKNKGAAKTRKTTTTPGRKPRGRPKKLEKEEEEGISQESSEEEQ

SEQ ID NO: 174 - DNA, 1827 bp, Homo sapiens
ctgggtgagaacagagaagagagctggtggtgggcaccacccctggctgtgtgattggctctttttggtcctgagtcttgcaccttgccagataggcaatattgtcagtgagcatcccagccatcactcttccacctgctccttagagaagggaagatgagtgagtcgagctcgaagtccagccagcccttggcctccaagcaggaaaaggacggcactgagaagcggggccggggcaggccgcgcaagcagcctccggtgagtcccgggacagcgctggtagggagtcagaaggagcccagcgaagtgccaacacctaagagacctcggggccgaccaaagggaagcaaaaacaagggtgctgccaagacccggaaaaccaccacaactccaggaaggaaaccaaggggcagacccaaaaaactggagaaggaggaagaggagggcatctcgcaggagtcctcggaggaggagcagtgacccatgcgtgccgcctgctcctcactggaggagcagcttccttctgggactggacagctttgctccgctcccaccgcccccgccccttccccaggcccaccatcaccaccgcctctggccgccacccccatcttccacctgtgccctcaccaccacactacacagcacaccagccgctgcagggctcccatgggctgagtggggagcagttttcccctggcctcagttcccagctccccccgcccacccacgcatacacacatgccctcctggacaaggctaacatcccacttagccgcaccctgcacctgctgcgtccccactcccttggtggtggggacattgctctctgggcttttggtttgggggcgccctctctgctccttcactgttccctctggcttcccatagtggggcctgggagggttcccctggccttaaaaggggcccaagccccatctcatcctggcacgccctactccactgccctggcagcagcaggtgtggccaatggaggggggtgctggcccccaggattcccccagccaaactgtctttgtcaccacgtggggctcacttttcatccttccccaacttccctagtccccgtactaggttggacagcccccttcggctacaggaaggcaggaggggtgagtcccctactccctcttcactgtggccacagcccccttgccctccgcctgggatctgagtacatattgtggtgatggagatgcagtcacttattgtccaggtgaggcccaagagccctgtggccgccacctgaggtgggctggggctgctcccctaaccctactttgcttccgccactcagccatttccccctcctcagatggggcaccaataacaaggagctcaccctgcccgctcccaacccccctcctgctcctccctgccccccaaggttctggttccatttttcctctgttcacaaactacctctggacagttgtgttgttttttgttcaatgttccattcttcgacatccgtcattgctgctgctaccagcgccaaatgttcatcctcattgcctcctgttctgcccacgatcccctcccccaagatactctttgtggggaagaggggctggggcatggcaggctgggtgaccgactaccccagtcccagggaaggtggggccctgcccctaggatgctgcagcagagtgagcaagggggcccgaatcgaccataaagggtgtaggggccacctcctccccctgttctgttggggaggggtagccatgatttgtcccagcctggggctccctctctggtttcctatttgcagttacttgaataaaaaaaatatccttttctgga

SEQ ID NO: 175 - protein, 107 aa, Homo sapiens; identical to SEQ ID NO: 173

SEQ ID NO: 176 - DNA, 1807 bp, Homo sapiens
tctttttaagctcccctgagccggtgctgcgctcctctaattgggactccgagccggggctatttctggcgctggcgcggctccaagaaggccatcccagccatcactcttccacctgctccttagagaagggaagatgagtgagtcgagctcgaagtccagccagcccttggcctccaagcaggaaaaggacggcactgagaagcggggccggggcaggccgcgcaagcagcctccggtgagtcccgggacagcgctggtagggagtcagaaggagcccagcgaagtgccaacacctaagagacctcggggccgaccaaagggaagcaaaaacaagggtgctgccaagacccggaaaaccaccacaactccaggaaggaaaccaaggggcagacccaaaaaactggagaaggaggaagaggagggcatctcgcaggagtcctcggaggaggagcagtgacccatgcgtgccgcctgctcctcactggaggagcagcttccttctgggactggacagctttgctccgctcccaccgcccccgccccttccccaggcccaccatcaccaccgcctctggccgccacccccatcttccacctgtgccctcaccaccacactacacagcacaccagccgctgcagggctcccatgggctgagtggggagcagttttcccctggcctcagttcccagctccccccgcccacccacgcatacacacatgccctcctggacaaggctaacatcccacttagccgcaccctgcacctgctgcgtccccactcccttggtggtggggacattgctctctgggcttttggtttgggggcgccctctctgctccttcactgttccctctggcttcccatagtggggcctgggagggttcccctggccttaaaaggggcccaagccccatctcatcctggcacgccctactccactgccctggcagcagcaggtgtggccaatggaggggggtgctggcccccaggattcccccagccaaactgtctttgtcaccacgtggggctcacttttcatccttccccaacttccctagtccccgtactaggttggacagcccccttcggctacaggaaggcaggaggggtgagtcccctactccctcttcactgtggccacagcccccttgccctccgcctgggatctgagtacatattgtggtgatggagatgcagtcacttattgtccaggtgaggcccaagagccctgtggccgccacctgaggtgggctggggctgctcccctaaccctactttgcttccgccactcagccatttccccctcctcagatggggcaccaataacaaggagctcaccctgcccgctcccaacccccctcctgctcctccctgccccccaaggttctggttccatttttcctctgttcacaaactacctctggacagttgtgttgttttttgttcaatgttccattcttcgacatccgtcattgctgctgctaccagcgccaaatgttcatcctcattgcctcctgttctgcccacgatcccctcccccaagatactctttgtggggaagaggggctggggcatggcaggctgggtgaccgactaccccagtcccagggaaggtggggccctgcccctaggatgctgcagcagagtgagcaagggggcccgaatcgaccataaagggtgtaggggccacctcctccccctgttctgttggggaggggtagccatgatttgtcccagcctggggctccctctctggtttcctatttgcagttacttgaataaaaaaaatatccttttctgga

SEQ ID NO: 177 - protein, 107 aa, Homo sapiens; identical to SEQ ID NO: 173
